(19) United States
(12) Patent Application Publication
(10) Pub. No.: US 2025/0333544 A1
(43) Pub. Date: Oct. 30, 2025

(54) TETRAVALENT BISPECIFIC AND TETRASPECIFIC ANTIGEN BINDING PROTEINS AND USES THEREOF

(71) Applicant: AMGEN INC., Thousand Oaks, CA (US)

(72) Inventors: Gunasekaran KANNAN, Daly City, CA (US); Michelle HORTTER, Camarillo, CA (US); Edward J. BELOUSKI, Thousand Oaks, CA (US)

(73) Assignee: AMGEN INC., Thousand Oaks, CA (US)

(21) Appl. No.: 19/021,384

(22) Filed: Jan. 15, 2025

Related U.S. Application Data
(63) Continuation of application No. 15/922,778, filed on Mar. 15, 2018.
(60) Provisional application No. 62/218,977, filed on Sep. 15, 2015.

(51) Int. Cl. C07K 16/46; C07K 16/00; C07K 16/24; C07K 16/28

(52) U.S. Cl. CPC C07K 16/468; C07K 16/00; C07K 16/241; C07K 16/2875; C07K 2317/14; C07K 2317/31; C07K 2317/35; C07K 2317/522; C07K 2317/56; C07K 2317/66; C07K 2317/90

(57) ABSTRACT

The present invention relates to tetravalent bispecific and tetraspecific antigen binding proteins that are capable of binding to multiple targets. Pharmaceutical compositions comprising the bispecific and tetraspecific antigen binding proteins as well as methods for producing them are also disclosed.

### FIELD OF THE INVENTION

[0001] The present invention relates to tetravalent bispecific and tetraspecific antibodies, polynucleotides encoding tetravalent bispecific and tetraspecific antibodies, and methods of making tetravalent bispecific and tetraspecific antibodies.

### DESCRIPTION OF THE TEXT FILE SUBMITTED ELECTRONICALLY

[0002] The present application contains a Sequence Listing, which has been submitted electronically in XML format and is hereby incorporated by reference in its entirety. The computer readable format copy of the Sequence Listing, which was created on Jan. 3, 2025, is named A-2009-US03-CNT_ST26 and is 1,894,389 bytes in size.

### BACKGROUND OF THE INVENTION

[0003] Current bispecific antibody technologies mostly rely on the scFv (single-chain fragment of the variable regions) format (Coloma and Morrison, Nature Biotechnol. 15:159, 1997; Lu et al, J. Biol. Chem. 280:19665, 2005) in which each VH (variable region of the heavy chain) is covalently linked to its cognate VL (variable region of the light chain), because in a Fab format there is yet no existing technology that can direct the specific pairing of a free light chain to only its cognate heavy chain and therefore the free light chains of different antigen specificity pair randomly with the heavy chains. However, expression of single-chain antibodies is often technically challenging, due to possible loss of binding affinity, protein aggregation, poor stability, and low production level (Demarest et al, Curr. Opin. Drug Discov. Devel. 11:675, 2008; Michaelson et al, mAbs 1:2, 128-141, 2009). This is especially true if the starting antibody is from a hybridoma (as opposed to a single-chain antibody from a phage display library) that has to be reformatted into a single-chain antibody. On the other hand, scFv's isolated from phages often are expressed poorly in mammalian cells.

[0004] Several innovative technologies have enabled the almost exclusive assembly of the Fc heterodimer to provide the backbone for designing bispecificity, e.g. knob-in-hole (Ridgway et al, Protein Eng. 9:617, 1996), electrostatic steering (Gunasekaran et al, J. Biol. Chem. 285:19637, 2010) and strand-exchange engineering domain (SEED) (Davis, Protein Eng. Des. & Sel. 23:195, 2010). In the Dual Variable Domains (DVD)-lg approach, the VL and VH of the second antibody are fused via flexible linkers to the N-termini of the light and heavy chains, respectively, of the first antibody, creating two variable domains (VD) in tandem, called the outer VD and the inner VD (Wu et al, ibid). Due to the steric hindrance caused by the proximity of the outer VD to the ligand-binding site of the inner VD, extensive optimization involving VD selection from a number of available monoclonal antibodies, orientation of VDs, and linker designs, most of which have to be empirically determined, is necessary to retain the binding affinity of the inner VD (DiGiammarino et al, Methods Mol. Biol. 899:145, 2012).

[0005] Another method takes advantage of the species-restricted heavy and light chain pairing in rat/mouse quadromas (Lindhofer et al, J. Immunol. 155:219, 1995). However, the bispecific antibody generated is a rat/mouse antibody, which obviously has immunogenicity issues as a therapeutic.

[0006] The Crossmab approach, based on the knob-into-hole heterodimerized heavy chains, in addition uses immunoglobulin domain crossover as a generic approach for the production of bispecific IgG antibodies (Schaefer et al, Proc. Natl. Acad. Sci. USA, 108:11 187, 2011). Nevertheless, the correct pairings of the H chain heterodimer and the cognate Fv's are not exclusive, and the unwanted side products have to be removed during purification.

[0007] An extension of the Crossmab approach was used to generate a tetravalent bispecific antibody by tagging an extra set of Fab and Crossmab Fab fragments to the C-termini of Crossmab (Regula et al, US Patent Application No: 2010/0322934), and the challenges of obtaining exclusively correct pairings of the H chain heterodimer and the cognate Fv's remain.

[0008] A further approach to bispecificity is to use a single binding site to target two different antigens was demonstrated by a “two-in-one” antibody. One such “two-in-one” antibody is a variant of the antibody Herceptin, which interacts with both Her2 and VEGF (Bostrom et al, Science 323:1610, 2009). This approach is attractive for clinical applications because it provides a bispecific antibody that has an identical format as a normal IgG. However, screening for such a variant is very labor intensive and there is no guarantee that a single binding site which can bind both antigens of interest can be obtained.

[0009] A stable multivalent antibody with only monospecificity based on a single set of Fab fragments was described in US published patent application US2011/0076722. Another technology uses Dock-and-Lock domains to link preformed Fab fragments of a different specificity to an antibody to form a hexavalent bispecific antibody (Rossi et al, Cancer Res. 68:8384, 2008). Since the vast majority of antibodies (i.e. those generated from hybridomas, Fab libraries and B-cell cloning, regardless of whether the origin is from normal mice, rats, and rabbits, or transgenic (humanized) mice or rats, or patients) have a free light chain paired with its cognate heavy chain, a Fab-based technology for bispecific antibodies that circumvents the problem of random light chain pairing is urgently needed. Such a technology would facilitate straightforward and efficient production of a bispecific antibody from two existing antibodies, which can be used first as a versatile tool molecule to probe the potential synergism of dual targeting, and secondly as a therapeutic to exploit the dual targeting in the context of a complete antibody in the disease setting to be treated.

### SUMMARY OF THE INVENTION

[0010] The present invention is directed to a bispecific antigen binding protein is comprised of an antibody against a first target and a Fab fragment derived from an antibody against a second target. In this IgG-Fab format, the bispecific, multivalent antigen binding protein comprises (i) a first polypeptide comprising a first heavy chain (VH2-CH1-CH2-CH3) from the first antibody, wherein the first heavy chain is fused at its carboxyl terminus (optionally through a peptide linker) to a polypeptide comprising VH2-CHI domains of a second antibody to form a modified heavy chain, (ii) a second polypeptide comprising a light chain from a first antibody (VL1-CL) and (iii) a third polypeptide comprising VL2-CL domains of the second antibody. The CL and CH1 domains of the first antibody may be switched in some embodiments between the first and second polypeptide. In such embodiments, the second polypeptide comprises VL1-CH1, while the first polypeptide comprises VH1-CL-CH2-CH3-VH2-CH1. The third polypeptide comprises VL2-CL. Alternatively, the CL and CH1 domains of the second antibody may be switched in some embodiments between the first and third polypeptides. In such embodiments, the third polypeptide comprises VL2-CH1, while the first polypeptide comprises VH1-CHI-CH2-CH3-VH2-CL. The first polypeptide comprises VL1-CL. In yet another embodiment, the CL and CHI domains of both antibodies are switched between the first, second and third polypeptides. In such embodiments, the first polypeptide comprises VH1-CL-CH2-CH3-VH2-CL, the second polypeptide comprises VL1-CH1, and the third polypeptide comprises VL2-CH1.

[0011] In one aspect, the present invention comprises a bispecific, tetravalent antigen binding protein, comprising a) a first heavy chain of a first antibody (VH1), wherein the first antibody specifically binds to a first antigen, and wherein the first heavy chain is fused through its C-terminus to the N-terminus of a moiety comprising a second heavy chain of a second antibody (VH2), wherein the second antibody specifically binds to a second antigen; b) two light chains of the first antibody of a); and c) two light chains of the second antibody of a).

[0012] In another aspect, the present invention comprises a bispecific antigen binding protein comprising (i) a first binding domain that specifically binds to a first antigen comprising a first light chain immunoglobulin variable region (VL1) and a first heavy chain immunoglobulin variable region (VH1); (ii) a second binding domain that specifically binds to a second antigen comprising a second light chain immunoglobulin variable region (VL2) and a second heavy chain immunoglobulin variable region (VH2); and (iii) a human immunoglobulin Fc region, wherein one of the binding domains is positioned at the amino terminus of the Fc region and the other binding domain is positioned at the carboxyl terminus of the Fc region, wherein the carboxyl-terminal binding domain is a Fab and is fused through a peptide linker to the carboxyl terminus of the Fc region, and wherein the Fab is fused to the Fc region through the amino terminus of the VH region of the Fab.

[0013] In another aspect, the present invention comprises a tetraspecific, tetravalent antigen binding protein, comprising a) a first heavy chain of a first antibody (VH1), wherein the first antibody specifically binds to a first antigen, wherein the CH1 domain of the first heavy chain is replaced by the CL domain of a light chain, and wherein the first heavy chain is fused through its C-terminus to the N-terminus of a moiety comprising a second heavy chain of a second antibody (VH2), wherein the second antibody specifically binds to a second antigen; b) a first light chain of the first antibody of a), wherein the CL domain of the first light chain is replaced by the CH1 domain of a heavy chain; c) a second light chain of the second antibody of a); d) a second heavy chain of a third antibody (VH3), wherein the third antibody specifically binds to a third antigen, wherein the CH1 domain of the second heavy chain is replaced by the CL domain of a light chain, and wherein the third heavy chain is fused through its C-terminus to the N-terminus of a moiety comprising a fourth heavy chain of a fourth antibody (VH4), wherein the fourth antibody specifically binds to a fourth antigen; e) a third light chain of the third antibody of d), wherein the CL domain of the third light chain is replaced by the CH1 domain of a heavy chain; and f) a fourth light chain of the fourth antibody of d).

[0014] In another aspect, the present invention comprises a bispecific, tetravalent antigen binding protein, comprising:
[0015] a) a first polypeptide comprising a first heavy chain of a first antibody comprising a first heavy chain variable region (VH1) and a first CH1 domain, wherein the first antibody specifically binds to a first antigen, and wherein the first heavy chain is fused through its C-terminus to the N-terminus of a polypeptide comprising a second heavy chain variable region of a second antibody (VH2), wherein the VH2 is fused through its C-terminus to the N-terminus of a second CH1 domain, and wherein the second antibody specifically binds to a second antigen; wherein
   [0016] i) the VH1 or first CH1 domain comprises at least one amino acid substitution to introduce a charged amino acid at a residue selected from the group consisting of positions 39, 44, and 183 using EU numbering; and
   [0017] ii) the VH2 or second CH1 domain comprises at least one amino acid substitution to introduce a charged amino acid at a residue selected from the group consisting of a residue that corresponds to positions 39, 44, and 183 using EU numbering, wherein the charge is the opposite of the substituted residue of the VH1 or first CH1 of the first heavy chain; and
[0018] b) a second polypeptide comprising a first light chain of the first antibody of a), wherein the first light chain comprises a first light chain variable region (VL1) and a first CL region; and wherein the VL1 or first CL domain comprises at least one amino acid substitution to introduce a charged amino acid at a residue selected from the group consisting of positions 38, 100, and 176 using EU numbering, wherein
[0019] the charge at position 38 is the opposite of the substituted residue of the VH1 or first CH1 of the first heavy chain at position 39; the charge at position 100 is the opposite of the substituted residue of the VH1 or first CH1 of the first heavy chain at position 44; the charge at position 176 is the opposite of the substituted residue of the VH1 or first CH1 of the first heavy chain at position 183; and
[0020] c) a third polypeptide comprising a second light chain of the second antibody of a), wherein the second light chain comprises a second light chain variable region (VL2) and a second CL region; and wherein the VL2 or second CL domain comprises at least one amino acid substitution to introduce a charged amino acid at a residue selected from the group consisting of positions 38, 100, and 176 using EU numbering, wherein the charge at position 38 is the opposite of the substituted residue of the VH2 or second CH1 of the second heavy chain at position 39; the charge at position 100 is the opposite of the substituted residue of the VH2 or second CH1 of the second heavy chain at position 44; the charge at position 176 is the opposite of the substituted residue of the VH2 or second CH1 of the second heavy chain at position 183.

[0021] In certain embodiments, the first heavy chain is fused to the VH2 via a peptide linker. In certain embodiments, the peptide linker comprises a sequence selected from the group consisting of (Gly₃Ser)₂, (Gly₄Ser)₂, (Gly₃Ser)₃, (Gly₄Ser)₃, (Gly₃Ser)₄, (Gly₄Ser)₄, (Gly₃Ser)₅, (Gly₄Ser)₅, (Gly₃Ser)₆, and (Gly₄Ser)₆.

[0022] In certain embodiments, the antigen binding protein according to claim 15, wherein a) the VH1 comprises a Q39E mutation and the first CH1 domain comprises a S183K mutation using EU numbering; b) the VH2 comprises a Q39K mutation and the second CH1 domain comprises a S183E mutation using EU numbering; c) the VL1 comprises a Q38K mutation and the first CL domain comprises a S176E mutation using EU numbering; and d) the VL2 comprises a Q38E mutation and the second CL domain comprises a S176K mutation using EU numbering.

[0023] In certain embodiments, the antigen binding protein according to claim 16, wherein a) the first CH1 domain comprises G44E and S183K mutations using EU numbering; b) the second CH1 domain comprises G44K and S183E mutations using EU numbering; c) the first CL domain comprises G100K and S176E mutations using EU numbering; and d) the second CL domain comprises G100E and S176K mutations using EU numbering.

[0024] In certain embodiments, the antigen binding protein according to claim 16, wherein a) the VH1 comprises a Q39K mutation and the first CH1 domain comprises a S183E mutation using EU numbering; b) the VH2 comprises a Q39E mutation and the second CH1 domain comprises a S183K mutation using EU numbering; c) the VL1 comprises a Q38E mutation and the first CL domain comprises a S176K mutation using EU numbering; and d) the VL2 comprises a Q38K mutation and the second CL domain comprises a S176E mutation using EU numbering.

[0025] In certain embodiments, the antigen binding protein according to claim 16, wherein a) the first CH1 domain comprises G44K and S183E mutations using EU numbering; b) the second CH1 domain comprises G44E and S183K mutations using EU numbering; c) the first CL domain comprises G100E and S176K mutations using EU numbering; and d) the second CL domain comprises G100K and S176E mutations using EU numbering.

[0026] The present invention includes one or more nucleic acids encoding any of the bispecific antigen binding proteins described herein or components thereof, as well as vectors comprising the nucleic acids. Also encompassed within the invention is a recombinant host cell, such as a CHO cell, that expresses any of the bispecific antigen binding proteins.

[0027] The present invention also provides a pharmaceutical composition comprising a bispecific antigen binding protein and a pharmaceutically acceptable diluent, excipient or carrier.

### BRIEF DESCRIPTION OF THE DRAWINGS

[0028] FIG. 1 depicts a schematic representation of a bispecific IgG-Fab format of the present invention. In this format, one polypeptide chain of a Fab fragment from a second antibody (e.g. the heavy chain (VH2-CH1) is fused to the carboxyl terminus of the heavy chain of a first antibody through a peptide linker to produce a modified heavy chain. The complete molecule is a homohexamer comprising two modified heavy chains, two light chains from the first antibody, and two polypeptide chains containing the other half of the Fab fragment from the second antibody (e.g. the light chain (VL2-CL)). Charge pair mutations (represented by the circles) can be introduced into the Fab regions of the first antibody (Fab 1) and/or second antibody (Fab 2) to promote correct heavy chain-light chain pairs.

[0029] FIG. 2 depicts a schematic representation of a bispecific IgG-Fab format of the present invention using immunoglobulin domain crossover. In this format, one polypeptide chain of a Fab fragment from a second antibody (e.g. the heavy chain (VH2-CH1) is fused to the carboxyl terminus of the heavy chain comprising a CL instead of a CH1 domain of a first antibody through a peptide linker to produce a modified heavy chain. The complete molecule is a homohexamer comprising two modified heavy chains, two light chains from the first antibody comprising a CH1 domain instead of a CL domain, and two polypeptide chains containing the other half of the Fab fragment from the second antibody (e.g. the light chain (VL2-CL)). Charge pair mutations (represented by the circles) can be introduced into the Fab regions of the first antibody (Fab 1) and/or second antibody (Fab 2) to promote correct heavy chain-light chain pairs.

[0030] FIG. 3 depicts a schematic representation of a tetraspecific IgG-Fab format of the present invention using immunoglobulin domain crossover with heavy chain heterodimers. In this format, one polypeptide chain of a Fab fragment from a second antibody (e.g. the heavy chain (VH2-CH1) is fused to the carboxyl terminus of the heavy chain comprising a CL instead of a CH1 domain of a first antibody through a peptide linker to produce a first modified heavy chain. Similarly, another polypeptide chain of a Fab fragment from a fourth antibody (e.g. the heavy chain (VH4-CH1) is fused to the carboxyl terminus of the heavy chain comprising a CL instead of a CH1 domain of a third antibody through a peptide linker to produce a second modified heavy chain. The two heavy chains can be engineered to preferentially form heterodimers as opposed to homodimers. The complete molecule is a hexamer comprising two modified heavy chains that form heterodimers, one light chain from the first antibody comprising a CH1 domain instead of a CL domain, one light chain from the third antibody comprising a CH1 domain instead of a CL domain, one polypeptide chain containing the other half of the Fab fragment from the second antibody (e.g. the light chain (VL2-CL)), and one polypeptide chain containing the other half of the Fab fragment from the fourth antibody (e.g. the light chain (VL4-CL)). Charge pair mutations (represented by the circles) can be introduced into the Fab regions of the antibodies to promote correct heavy chain-light chain pairs.

[0031] FIG. 4 depicts a schematic representation of a tetraspecific IgG-Fab format the same as in FIG. 3, except that the charges of the mutated residues of the heavy chain heterodimer are reversed.

[0032] FIG. 5 depicts a schematic representation of a tetravalent, bispecific IgG-Fab format (IgG-Fab CPMv1) of the present invention constructed using insertion of charged amino acids at heavy chain position 230 (AHo numbering) and light chain position 230 (AHo numbering).

[0033] FIG. 6 depicts a schematic representation of a tetravalent, bispecific IgG-Fab format (IgG-Fab CPMv1 N-term CH/CL swap) of the present invention constructed using insertion of charged amino acids at heavy chain position 230 (AHo numbering) and light chain position 230 (AHo numbering) and swapping of CH1 and CL domains in the N-terminal region of the molecule.

[0034] FIG. 7 depicts a schematic representation of a tetravalent, bispecific IgG-Fab format (IgG-Fab CPMv1 C-term CH/CL swap) of the present invention constructed using insertion of charged amino acids at heavy chain position 230 (AHo numbering) and light chain position 230 (AHo numbering) and swapping of CH1 and CL domains in the C-terminal region of the molecule.

[0035] FIG. 8 depicts a schematic representation of a tetravalent, bispecific IgG-Fab format (IgG-Fab CPMv1 CH/CL both swap) of the present invention constructed using insertion of charged amino acids at heavy chain position 230 (AHo numbering) and light chain position 230 (AHo numbering) and swapping of CH1 and CL domains in both the N-terminal and C-terminal regions of the molecule.

[0036] FIG. 9 depicts a schematic representation of a tetravalent, bispecific IgG-Fab format (IgG-Fab CPMv2) of the present invention constructed using insertion of charged amino acids at heavy chain positions 46 and 230 (AHo numbering) and light chain positions 46 and 230 (AHo numbering).

[0037] FIG. 10 depicts a schematic representation of a tetravalent, bispecific IgG-Fab format (IgG-Fab CPMv2 N-term CH/CL swap) of the present invention constructed using insertion of charged amino acids at heavy chain positions 46 and 230 (AHo numbering) and light chain positions 46 and 230 (AHo numbering) and swapping of CH1 and CL domains in the N-terminal region of the molecule.

[0038] FIG. 11 depicts a schematic representation of a tetravalent, bispecific IgG-Fab format (IgG-Fab CPMv2 C-term CH/CL swap) of the present invention constructed using insertion of charged amino acids at heavy chain positions 46 and 230 (AHo numbering) and light chain positions 46 and 230 (AHo numbering) and swapping of CH1 and CL domains in the C-terminal region of the molecule.

[0039] FIG. 12 depicts a schematic representation of a tetravalent, bispecific IgG-Fab format (IgG-Fab CPMv2 CH/CL both swap) of the present invention constructed using insertion of charged amino acids at heavy chain positions 46 and 230 (AHo numbering) and light chain positions 46 and 230 (AHo numbering) and swapping of CH1 and CL domains in both the N-terminal and C-terminal regions of the molecule.

[0040] FIG. 13 depicts a schematic representation of a tetravalent, bispecific IgG-Fab format (IgG-Fab CPMv3) of the present invention constructed using insertion of charged amino acids at heavy chain positions 51 and 230 (AHo numbering) and light chain positions 141 and 230 (AHo numbering).

[0041] FIG. 14 depicts a schematic representation of a tetravalent, bispecific IgG-Fab format (IgG-Fab CPMv3 N-term CH/CL swap) of the present invention constructed using insertion of charged amino acids at heavy chain positions 51 and 230 (AHo numbering) and light chain positions 141 and 230 (AHo numbering) and swapping of CH1 and CL domains in the N-terminal region of the molecule.

[0042] FIG. 15 depicts a schematic representation of a tetravalent, bispecific IgG-Fab format (IgG-Fab CPMv3 C-term CH/CL swap) of the present invention constructed using insertion of charged amino acids at heavy chain positions 51 and 230 (AHo numbering) and light chain positions 141 and 230 (AHo numbering) and swapping of CH1 and CL domains in the C-terminal region of the molecule.

[0043] FIG. 16 depicts a schematic representation of a tetravalent, bispecific IgG-Fab format (IgG-Fab CPMv3 CH/CL both swap) of the present invention constructed using insertion of charged amino acids at heavy chain positions 51 and 230 (AHo numbering) and light chain positions 141 and 230 (AHo numbering) and swapping of CH1 and CL domains in both the N-terminal and C-terminal regions of the molecule.

[0044] FIG. 17 compares the expression titer of IgG-Fabs based on domain swapping format.

[0045] FIG. 18 compares the expression titer of IgG-Fabs based on type of charge pair mutation(s).

[0046] FIG. 19 compares the purity of IgG-Fabs based on domain swapping format.

[0047] FIG. 20 compares the anti-TL1A potency of IgG-Fabs based on domain swapping format.

[0048] FIG. 21 compares the anti-TNFα potency of IgG-Fabs based on domain swapping format.

[0049] FIG. 22 compares the anti-TL1A potency of IgG-Fabs based on type of charge pair mutation(s).

[0050] FIG. 23 compares the anti-TNFα potency of IgG-Fabs based on type of charge pair mutation(s).

### DETAILED DESCRIPTION

[0051] As used herein, the term “antigen binding protein” refers to a protein that specifically binds to one or more target antigens. An antigen binding protein can include an antibody and functional fragments thereof. A “functional antibody fragment” is a portion of an antibody that lacks at least some of the amino acids present in a full-length heavy chain and/or light chain, but which is still capable of specifically binding to an antigen. A functional antibody fragment includes, but is not limited to, a Fab fragment, a Fab′ fragment, a F(ab′)₂ fragment, a Fv fragment, a Fd fragment, and a complementarity determining region (CDR) fragment, and can be derived from any mammalian source, such as human, mouse, rat, rabbit, or camelid. Functional antibody fragments may compete for binding of a target antigen with an intact antibody and the fragments may be produced by the modification of intact antibodies (e.g. enzymatic or chemical cleavage) or synthesized de novo using recombinant DNA technologies or peptide synthesis.

[0052] “Heavy” and “light” chains refer to the two polypeptides which comprise an IgG. A heavy chain can be broken down into the following domains from N-terminus to C-terminus: VH, CH1, CH2, and CH3. A light chain can be broken down into the following domains from N-terminus to C-terminus: VL and CL. The CH1 and CL domains will interact such that the VH and VL domains form a functional conformation.

[0053] An antigen binding protein can also include a protein comprising one or more functional antibody fragments incorporated into a single polypeptide chain or into multiple polypeptide chains. For instance, antigen binding proteins can include, but are not limited to, a diabody (see, e.g., EP 404,097; WO 93/11161; and Hollinger et al., Proc. Natl. Acad. Sci. USA, Vol. 90:6444-6448, 1993); an intrabody; a domain antibody (single VL or VH domain or two or more VH domains joined by a peptide linker; see Ward et al., Nature, Vol. 341:544-546, 1989); a maxibody (2 scFvs fused to Fc region, see Fredericks et al., Protein Engineering, Design & Selection, Vol. 17:95-106, 2004 and Powers et al., Journal of Immunological Methods, Vol. 251:123-135, 2001); a triabody; a tetrabody; a minibody (scFv fused to CH3 domain; see Olafsen et al., Protein Eng Des Sel., Vol. 17:315-23, 2004); a peptibody (one or more peptides attached to an Fc region, see WO 00/24782); a linear antibody (a pair of tandem Fd segments (VH-CH1-VH-CH1) which, together with complementary light chain polypeptides, form a pair of antigen binding regions, see Zapata et al., Protein Eng., Vol. 8:1057-1062, 1995); a small modular immunopharmaceutical (see U.S. Patent Publication No. 20030133939); and immunoglobulin fusion proteins (e.g. IgG-scFv, IgG-Fab, 2scFv-IgG, 4scFv-IgG, VH-IgG, IgG-VH, and Fab-scFv-Fc).

[0054] In certain aspects, the antigen binding proteins of the present invention are “bispecific” meaning that they are capable of specifically binding to two different antigens. In another aspect, the antigen binding proteins of the present invention are “tetraspecific” meaning that they are capable of specifically binding to four different antigens. As used herein, an antigen binding protein “specifically binds” to a target antigen when it has a significantly higher binding affinity for, and consequently is capable of distinguishing, that antigen, compared to its affinity for other unrelated proteins, under similar binding assay conditions. Antigen binding proteins that specifically bind an antigen may have an equilibrium dissociation constant (K_{D})≤1×10⁻⁶ M. The antigen binding protein specifically binds antigen with “high affinity” when the K_{D} is ≤1×10⁻⁸ M. In one embodiment, the antigen binding proteins of the invention bind to target antigen(s) with a K_{D} of ≤5×10⁻⁷ M. In another embodiment, the antigen binding proteins of the invention bind to target antigen(s) with a K_{D} of ≤1×10⁻⁷ M.

[0055] Affinity is determined using a variety of techniques, an example of which is an affinity ELISA assay. In various embodiments, affinity is determined by a surface plasmon resonance assay (e.g., BIAcore®-based assay). Using this methodology, the association rate constant (kₐ in M⁻¹s⁻¹) and the dissociation rate constant (k_{d} in s⁻¹) can be measured. The equilibrium dissociation constant (K_{D} in M) can then be calculated from the ratio of the kinetic rate constants (k_{d}/kₐ). In some embodiments, affinity is determined by a kinetic method, such as a Kinetic Exclusion Assay (KinExA) as described in Rathanaswami et al. Analytical Biochemistry, Vol. 373:52-60, 2008. Using a KinExA assay, the equilibrium dissociation constant (KD) in M) and the association rate constant (kₐ in M⁻¹s⁻¹) can be measured. The dissociation rate constant (k_{d} in s⁻¹) can be calculated from these values (K_{D}×kₐ). In other embodiments, affinity is determined by an equilibrium/solution method. In certain embodiments, affinity is determined by a FACS binding assay. In certain embodiments of the invention, the antigen binding protein specifically binds to target antigen(s) expressed by a mammalian cell (e.g., CHO, HEK 293, Jurkat), with a K_{D} of 20 nM (2.0×10⁻⁸ M) or less, K_{D} of 10 nM (1.0×10⁻⁸ M) or less, K_{D} of 1 nM (1.0×10⁻⁹ M) or less, K_{D} of 500 pM (5.0×10⁻¹⁰ M) or less, K_{D} of 200 pM (2.0×10⁻¹⁰ M) or less, K_{D} of 150 pM (1.50×10⁻¹⁰ M) or less, K_{D} of 125 pM (1.25×10⁻¹⁰ M) or less, K_{D} of 105 pM (1.05×10⁻¹⁰ M) or less, K_{D} of 50 pM (5.0×10⁻¹¹ M) or less, or K_{D} of 20 pM (2.0×10⁻¹¹ M) or less, as determined by a Kinetic Exclusion Assay, conducted by the method described in

[0056] Rathanaswami et al. Analytical Biochemistry, Vol. 373:52-60, 2008. In some embodiments, the bispecific antigen binding proteins described herein exhibit desirable characteristics such as binding avidity as measured by k_{d} (dissociation rate constant) for target antigen(s) of about 10⁻², 10⁻³, 10⁻⁴, 10⁻⁵, 10⁻⁶, 10⁻⁷, 10⁻⁸, 10⁻⁹, 10⁻¹⁰ s⁻¹ or lower (lower values indicating higher binding avidity), and/or binding affinity as measured by KD) (equilibrium dissociation constant) for target antigen(s) of about 10⁻⁹, 10⁻¹⁰, 10⁻¹¹, 10⁻¹², 10⁻¹³, 10⁻¹⁴, 10⁻¹⁵, 10⁻¹⁶ M or lower (lower values indicating higher binding affinity).

[0057] In certain embodiments of the invention, the antigen binding proteins are multivalent. The valency of the binding protein denotes the number of individual antigen binding domains within the binding protein. For example, the terms “monovalent,” “bivalent,” and “tetravalent” with reference to the antigen binding proteins of the invention refer to binding proteins with one, two, and four antigen binding domains, respectively. Thus, a tetravalent antigen binding protein comprises four or more antigen binding domains. In other embodiments, the bispecific antigen binding proteins are multivalent. For instance, in certain embodiments, the bispecific antigen binding proteins are tetravalent comprising four antigen-binding domains: two antigen-binding domains binding to a first target antigen and two antigen-binding domains binding to a second target antigen. A tetraspecific antigen binding protein is tetravalent and comprises four antigen-binding domains: one to antigen-binding domain binding to a first target antigen, one antigen-binding domain binding to a second target antigen, one to antigen-binding domain binding to a third target antigen, and one antigen-binding domain binding to a fourth target antigen.

[0058] In one embodiment the tetravalent bispecific antibody binds two distinct targets on two different cell types. An exemplary embodiment includes a tetravalent bispecific antibody bridging between target tumor cell and a natural killer cell to direct the natural killer cell to the tumor. In yet another embodiment of the invention, the tetravalent bispecific antibody binds two different epitopes on the same molecular target (i.e. biparatopic). It is also apparent to the one skilled in the art that one or both of the targets of the tetravalent bispecific antibody can be soluble or expressed on a cell surface.

[0059] As used herein, the term “antigen binding domain,” which is used interchangeably with “binding domain,” refers to the region of the antigen binding protein that contains the amino acid residues that interact with the antigen and confer on the antigen binding protein its specificity and affinity for the antigen. In some embodiments, the binding domain may be derived from the natural ligands of the target antigen(s). As used herein, the term “target antigen(s)” refers to a first target antigen and/or a second target antigen of a bispecific molecule and also refers to a first target antigen, a second target antigen, a third target antigen, and/or a fourth target antigen of a tetraspecific molecule.

[0060] In certain embodiments of the bispecific and tetraspecific antigen binding proteins of the invention, the binding domain may be derived from an antibody or functional fragment thereof. For instance, the binding domains of the bispecific and tetraspecific antigen binding proteins of the invention may comprise one or more complementarity determining regions (CDR) from the light and heavy chain variable regions of antibodies that specifically bind to target antigen(s). As used herein, the term “CDR” refers to the complementarity determining region (also termed “minimal recognition units” or “hypervariable region”) within antibody variable sequences. There are three heavy chain variable region CDRs (CDRH1, CDRH2 and CDRH3) and three light chain variable region CDRs (CDRL1, CDRL2 and CDRL3). The term “CDR region” as used herein refers to a group of three CDRs that occur in a single variable region (i.e. the three light chain CDRs or the three heavy chain CDRs). The CDRs in each of the two chains typically are aligned by the framework regions to form a structure that binds specifically with a specific epitope or domain on the target protein. From N-terminus to C-terminus, naturally-occurring light and heavy chain variable regions both typically conform with the following order of these elements: FR1, CDR1, FR2, CDR2, FR3, CDR3 and FR4.

[0061] Both the EU index as in Kabat et al., Sequences of Proteins of Immunological Interest, 5th Ed. Public Health Service, National Institutes of Health, Bethesda, MD (1991) and AHo numbering schemes (Honegger A. and Plückthun A. J Mol Biol. 2001 Jun. 8;309(3):657-70) can be used in the present invention. Amino acid positions and complementarity determining regions (CDRs) and framework regions (FR) of a given antibody may be identified using either system. For example, EU heavy chain positions of 39, 44, 183, 356, 357, 370, 392, 399, and 409 are equivalent to AHo heavy chain positions 46, 51, 230, 484, 485, 501, 528, 535, and 551, respectively. Similarly, EU light chain positions 38, 100, and 176 are equivalent to AHO light chain positions 46 141, and 230, respectively. Tables 1, 2, and 3 below demonstrate the equivalence between numbering positions.

TABLE 1
v1

| Chain | Domain | Mutation | AHo # | EU # | Kabat # |
|---|---|---|---|---|---|
| LC-E | Constant | E | 230 | 176 | 176 |
| LC-K | Constant | K | 230 | 176 | 176 |
| HC-E | CH1 | E | 230 | 183 | 188 |
| HC-K | CH1 | K | 230 | 183 | 188 |

TABLE 2
v2

| Chain | Domain | Mutation | AHo # | EU # | Kabat # |
|---|---|---|---|---|---|
| LC-E | Variable | E | 46 | 38 | 38 |
| | Constant | E | 230 | 176 | 176 |
| LC-K | Variable | K | 46 | 38 | 38 |
| | Constant | K | 230 | 176 | 176 |
| HC-E | Variable | E | 46 | 39 | 39 |
| | CH1 | E | 230 | 183 | 188 |
| HC-K | Variable | K | 46 | 39 | 39 |
| | CH1 | K | 230 | 183 | 188 |

TABLE 3
v3

| Chain | Domain | Mutation | AHo # | EU # | Kabat # |
|---|---|---|---|---|---|
| LC-E | Variable | E | 141 | 100 | 100 |
| | Constant | E | 230 | 176 | 176 |
| LC-K | Variable | K | 141 | 100 | 100 |
| | Constant | K | 230 | 176 | 176 |
| HC-E | Variable | E | 51 | 44 | 44 |
| | CH1 | E | 230 | 183 | 188 |
| HC-K | Variable | K | 51 | 44 | 44 |
| | CH1 | K | 230 | 183 | 188 |

[0062] Papain digestion of antibodies produces two identical antigen-binding fragments, called “Fab” fragments, each with a single antigen-binding site, and a residual “Fc” fragment which contains the immunoglobulin constant region. The Fab fragment contains all of the variable domain, as well as the constant domain of the light chain and the first constant domain (CH1) of the heavy chain. Thus, a “Fab fragment” is comprised of one immunoglobulin light chain (light chain variable region (VL) and constant region (CL)) and the CH1 region and variable region (VH) of one immunoglobulin heavy chain. The heavy chain of a Fab molecule cannot form a disulfide bond with another heavy chain molecule. The Fc fragment displays carbohydrates and is responsible for many antibody effector functions (such as binding complement and cell receptors), that distinguish one class of antibody from another. The “Fd fragment” comprises the VH and CH1 domains from an immunoglobulin heavy chain. The Fd fragment represents the heavy chain component of the Fab fragment.

[0063] A “Fab′ fragment” is a Fab fragment having at the C-terminus of the CH1 domain one or more cysteine residues from the antibody hinge region.

[0064] A “F (ab′)₂ fragment” is a bivalent fragment including two Fab' fragments linked by a disulfide bridge between the heavy chains at the hinge region.

[0065] The “Fv” fragment is the minimum fragment that contains a complete antigen recognition and binding site from an antibody. This fragment consists of a dimer of one immunoglobulin heavy chain variable region (VH) and one immunoglobulin light chain variable region (VL) in tight, non-covalent association. It is in this configuration that the three CDRs of each variable region interact to define an antigen binding site on the surface of the VH-VL dimer. A single light chain or heavy chain variable region (or half of an Fv fragment comprising only three CDRs specific for an antigen) has the ability to recognize and bind antigen, although at a lower affinity than the entire binding site comprising both VH and VL.

[0066] The “variable region,” used interchangeably herein with “variable domain” (variable region of a light chain (VL), variable region of a heavy chain (VH)) refers to the region in each of the light and heavy immunoglobulin chains which is involved directly in binding the antibody to the antigen. As discussed above, the regions of variable light and heavy chains have the same general structure and each region comprises four framework (FR) regions whose sequences are widely conserved, connected by three CDRs. The framework regions adopt a beta-sheet conformation and the CDRs may form loops connecting the beta-sheet structure. The CDRs in each chain are held in their three-dimensional structure by the framework regions and form, together with the CDRs from the other chain, the antigen binding site.

[0067] The “immunoglobulin domain” represents a peptide comprising an amino acid sequence similar to that of immunoglobulin and comprising approximately 100 amino acid residues including at least two cysteine residues. Examples of the immunoglobulin domain include VH, CH1, CH2, and CH3 of an immunoglobulin heavy chain, and VL and CL of an immunoglobulin light chain. In addition, the immunoglobulin domain is found in proteins other than immunoglobulin. Examples of the immunoglobulin domain in proteins other than immunoglobulin include an immunoglobulin domain included in a protein belonging to an immunoglobulin super family, such as a major histocompatibility complex (MHC), CD1, B7, T-cell receptor (TCR), and the like. Any of the immunoglobulin domains can be used as an immunoglobulin domain for the multivalent antibody of the present invention.

[0068] In a human antibody, CH1 means a region having the amino acid sequence at positions 118 to 215 of the EU index. A highly flexible amino acid region called a “hinge region” exists between CH1 and CH2. CH2 represents a region having the amino acid sequence at positions 231 to 340 of the EU index, and CH3 represents a region having the amino acid sequence at positions 341 to 446 of the EU index.

[0069] “CL” represents a constant region of a light chain. In the case of a k chain of a human antibody, CL represents a region having the amino acid sequence at positions 108 to 214 of the EU index. In a λ chain, CL represents a region having the amino acid sequence at positions 108 to 215.

[0070] The binding domains that specifically bind to target antigen(s) can be derived a) from known antibodies to these antigens or b) from new antibodies or antibody fragments obtained by de novo immunization methods using the antigen proteins or fragments thereof, by phage display, or other routine methods. The antibodies from which the binding domains for the bispecific and tetraspecific antigen binding proteins are derived can be monoclonal antibodies, polyclonal antibodies, recombinant antibodies, human antibodies, or humanized antibodies. In certain embodiments, the antibodies from which the binding domains are derived are monoclonal antibodies. In these and other embodiments, the antibodies are human antibodies or humanized antibodies and can be of the IgG1-, IgG2-, IgG3-, or IgG4-type.

[0071] The term “monoclonal antibody” (or “mAb”) as used herein refers to an antibody obtained from a population of substantially homogeneous antibodies, i.e., the individual antibodies comprising the population are identical except for possible naturally occurring mutations that may be present in minor amounts. Monoclonal antibodies are highly specific, being directed against an individual antigenic site or epitope, in contrast to polyclonal antibody preparations that typically include different antibodies directed against different epitopes. Monoclonal antibodies may be produced using any technique known in the art, e.g., by immortalizing spleen cells harvested from the transgenic animal after completion of the immunization schedule. The spleen cells can be immortalized using any technique known in the art, e.g., by fusing them with myeloma cells to produce hybridomas. Myeloma cells for use in hybridoma-producing fusion procedures are non-antibody-producing, have high fusion efficiency, and enzyme deficiencies that render them incapable of growing in certain selective media which support the growth of only the desired fused cells (hybridomas). Examples of suitable cell lines for use in mouse fusions include Sp-20, P3-X63/Ag8, P3-X63-Ag8.653, NS1/1.Ag 4 1, Sp210-Ag14, FO, NSO/U, MPC-11, MPC11-X45-GTG 1.7 and S194/5XXO Bul; examples of cell lines used in rat fusions include R210.RCY3, Y3-Ag 1.2.3, IR983F and 4B210. Other cell lines useful for cell fusions are U-266, GM1500-GRG2, LICR-LON-HMy2 and UC729-6.

[0072] In some instances, a hybridoma cell line is produced by immunizing an animal (e.g., a transgenic animal having human immunoglobulin sequences) with a target antigen(s) immunogen; harvesting spleen cells from the immunized animal; fusing the harvested spleen cells to a myeloma cell line, thereby generating hybridoma cells; establishing hybridoma cell lines from the hybridoma cells, and identifying a hybridoma cell line that produces an antibody that binds target antigen(s).

[0073] Monoclonal antibodies secreted by a hybridoma cell line can be purified using any technique known in the art, such as protein A-Sepharose, hydroxylapatite chromatography, gel electrophoresis, dialysis, or affinity chromatography. Hybridomas or mAbs may be further screened to identify mAbs with particular properties, such as the ability to bind cells expressing target antigen(s), ability to block or interfere with the binding of target antigen(s) to their respective receptors or ligands, or the ability to functionally block either of target antigen(s).

[0074] In some embodiments, the binding domains of the bispecific and tetraspecific antigen binding proteins of the invention may be derived from humanized antibodies against target antigen(s). A “humanized antibody” refers to an antibody in which regions (e.g. framework regions) have been modified to comprise corresponding regions from a human immunoglobulin. Generally, a humanized antibody can be produced from a monoclonal antibody raised initially in a non-human animal. Certain amino acid residues in this monoclonal antibody, typically from non-antigen recognizing portions of the antibody, are modified to be homologous to corresponding residues in a human antibody of corresponding isotype. Humanization can be performed, for example, using various methods by substituting at least a portion of a rodent variable region for the corresponding regions of a human antibody (see, e.g., U.S. Pat. Nos. 5,585,089 and 5,693,762; Jones et al., Nature, Vol. 321:522-525, 1986; Riechmann et al., Nature, Vol. 332:323-27, 1988; Verhoeyen et al., Science, Vol. 239:1534-1536, 1988). The CDRs of light and heavy chain variable regions of antibodies generated in another species can be grafted to consensus human FRs. To create consensus human FRs, FRs from several human heavy chain or light chain amino acid sequences may be aligned to identify a consensus amino acid sequence.

[0075] New antibodies generated against the target antigen(s) from which binding domains for the bispecific and tetraspecific antigen binding proteins of the invention can be derived can be fully human antibodies. A “fully human antibody” is an antibody that comprises variable and constant regions derived from human germ line immunoglobulin sequences. One specific means provided for implementing the production of fully human antibodies is the “humanization” of the mouse humoral immune system. Introduction of human immunoglobulin (Ig) loci into mice in which the endogenous Ig genes have been inactivated is one means of producing fully human monoclonal antibodies (mAbs) in mouse, an animal that can be immunized with any desirable antigen. Using fully human antibodies can minimize the immunogenic and allergic responses that can sometimes be caused by administering mouse or mouse-derived mAbs to humans as therapeutic agents.

[0076] Fully human antibodies can be produced by immunizing transgenic animals (usually mice) that are capable of producing a repertoire of human antibodies in the absence of endogenous immunoglobulin production. Antigens for this purpose typically have six or more contiguous amino acids, and optionally are conjugated to a carrier, such as a hapten. See, e.g., Jakobovits et al., 1993, Proc. Natl. Acad. Sci. USA 90:2551-2555; Jakobovits et al., 1993, Nature 362:255-258; and Bruggermann et al., 1993, Year in Immunol. 7:33. In one example of such a method, transgenic animals are produced by incapacitating the endogenous mouse immunoglobulin loci encoding the mouse heavy and light immunoglobulin chains therein, and inserting into the mouse genome large fragments of human genome DNA containing loci that encode human heavy and light chain proteins. Partially modified animals, which have less than the full complement of human immunoglobulin loci, are then cross-bred to obtain an animal having all of the desired immune system modifications. When administered an immunogen, these transgenic animals produce antibodies that are immunospecific for the immunogen but have human rather than murine amino acid sequences, including the variable regions. For further details of such methods, see, for example, WO96/33735 and WO94/02602. Additional methods relating to transgenic mice for making human antibodies are described in U.S. Pat. Nos. 5,545,807; 6,713,610; 6,673,986; 6, 162,963; 5,939,598; 5,545,807; 6,300,129; 6,255,458; 5,877,397; 5,874,299 and 5,545,806; in PCT publications WO91/10741, WO90/04036, WO 94/02602, WO 96/30498, WO 98/24893 and in EP 546073B1 and EP 546073A1.

[0077] The transgenic mice described above, referred to herein as “HuMab” mice, contain a human immunoglobulin gene minilocus that encodes unrearranged human heavy (mu and gamma) and kappa light chain immunoglobulin sequences, together with targeted mutations that inactivate the endogenous mu and kappa chain loci (Lonberg et al., 1994, Nature 368:856-859). Accordingly, the mice exhibit reduced expression of mouse IgM or kappa and in response to immunization, and the introduced human heavy and light chain transgenes undergo class switching and somatic mutation to generate high affinity human IgG kappa monoclonal antibodies (Lonberg et al., supra.; Lonberg and Huszar, 1995, Intern. Rev. Immunol. 13:65-93; Harding and Lonberg, 1995, Ann. N. Y Acad. Sci. 764:536-546). The preparation of HuMab mice is described in detail in Taylor et al., 1992, Nucleic Acids Research 20:6287-6295; Chen et al., 1993, International Immunology 5:647-656; Tuaillon et al., 1994, J. Immunol. 152:2912-2920; Lonberg et al., 1994, Nature 368:856-859; Lonberg, 1994, Handbook of Exp. Pharmacology 113:49-101; Taylor et al., 1994, International Immunology 6:579-591; Lonberg and Huszar, 1995, Intern. Rev. Immunol. 13:65-93Harding and Lonberg, 1995, Ann. N.Y Acad. Sci. 764:536-546; Fishwild et al., 1996, Nature Biotechnology 14:845-851; the foregoing references are hereby incorporated by reference in their entirety for all purposes. See, further U.S. Pat. Nos. 5,545,806; 5,569,825; 5,625,126; 5,633,425; 5,789,650; 5,877,397; 5,661,016; 5,814,318; 5,874,299; and 5,770,429; as well as U.S. Pat. No. 5,545,807; International Publication Nos. WO 93/1227; WO 92/22646; and WO 92/03918, the disclosures of all of which are hereby incorporated by reference in their entirety for all purposes. Technologies utilized for producing human antibodies in these transgenic mice are disclosed also in WO 98/24893, and Mendez et al., 1997, Nature Genetics 15:146-156, which are hereby incorporated by reference.

[0078] Human-derived antibodies can also be generated using phage display techniques. Phage display is described in e.g., Dower et al., WO 91/17271, McCafferty et al., WO 92/01047, and Caton and Koprowski, Proc. Natl. Acad. Sci. USA, 87:6450-6454 (1990), each of which is incorporated herein by reference in its entirety. The antibodies produced by phage technology are usually produced as antigen binding fragments, e.g. Fv or Fab fragments, in bacteria and thus lack effector functions. Effector functions can be introduced by one of two strategies: The fragments can be engineered either into complete antibodies for expression in mammalian cells, or into bispecific and tetraspecific antibody fragments with a second binding site capable of triggering an effector function, if desired. Typically, the Fd fragment (VH-CH1) and light chain (VL-CL) of antibodies are separately cloned by PCR and recombined randomly in combinatorial phage display libraries, which can then be selected for binding to a particular antigen. The antibody fragments are expressed on the phage surface, and selection of Fv or Fab (and therefore the phage containing the DNA encoding the antibody fragment) by antigen binding is accomplished through several rounds of antigen binding and re-amplification, a procedure termed panning. Antibody fragments specific for the antigen are enriched and finally isolated. Phage display techniques can also be used in an approach for the humanization of rodent monoclonal antibodies, called “guided selection” (see Jespers, L. S., et al., Bio/Technology 12, 899-903 (1994)). For this, the Fd fragment of the mouse monoclonal antibody can be displayed in combination with a human light chain library, and the resulting hybrid Fab library may then be selected with antigen. The mouse Fd fragment thereby provides a template to guide the selection. Subsequently, the selected human light chains are combined with a human Fd fragment library. Selection of the resulting library yields entirely human Fab.

[0079] The term “identity,” as used herein, refers to a relationship between the sequences of two or more polypeptide molecules or two or more nucleic acid molecules, as determined by aligning and comparing the sequences. “Percent identity,” as used herein, means the percent of identical residues between the amino acids or nucleotides in the compared molecules and is calculated based on the size of the smallest of the molecules being compared. For these calculations, gaps in alignments (if any) must be addressed by a particular mathematical model or computer program (i.e., an “algorithm”). Methods that can be used to calculate the identity of the aligned nucleic acids or polypeptides include those described in Computational Molecular Biology, (Lesk, A. M., ed.), 1988, New York: Oxford University Press; Biocomputing Informatics and Genome Projects, (Smith, D. W., ed.), 1993, New York: Academic Press; Computer Analysis of Sequence Data, Part I, (Griffin, A. M., and Griffin, H. G., eds.), 1994, New Jersey: Humana Press; von Heinje, G., 1987, Sequence Analysis in Molecular Biology, New York: Academic Press; Sequence Analysis Primer, (Gribskov, M. and Devereux, J., eds.), 1991, New York: M. Stockton Press; and Carillo et al., 1988, SIAM J. Applied Math. 48:1073. For example, sequence identity can be determined by standard methods that are commonly used to compare the similarity in position of the amino acids of two polypeptides. Using a computer program such as BLAST or FASTA, two polypeptide or two polynucleotide sequences are aligned for optimal matching of their respective residues (either along the full length of one or both sequences, or along a pre-determined portion of one or both sequences). The programs provide a default opening penalty and a default gap penalty, and a scoring matrix such as PAM 250 (a standard scoring matrix; see Dayhoff et al., in Atlas of Protein Sequence and Structure, vol. 5, supp. 3 (1978)) can be used in conjunction with the computer program. For example, the percent identity can then be calculated as: the total number of identical matches multiplied by 100 and then divided by the sum of the length of the longer sequence within the matched span and the number of gaps introduced into the longer sequences in order to align the two sequences. In calculating percent identity, the sequences being compared are aligned in a way that gives the largest match between the sequences.

[0080] The GCG program package is a computer program that can be used to determine percent identity, which package includes GAP (Devereux et al., 1984, Nucl. Acid Res. 12:387; Genetics Computer Group, University of Wisconsin, Madison, WI). The computer algorithm GAP is used to align the two polypeptides or two polynucleotides for which the percent sequence identity is to be determined. The sequences are aligned for optimal matching of their respective amino acid or nucleotide (the “matched span”, as determined by the algorithm). A gap opening penalty (which is calculated as 3× the average diagonal, wherein the “average diagonal” is the average of the diagonal of the comparison matrix being used; the “diagonal” is the score or number assigned to each perfect amino acid match by the particular comparison matrix) and a gap extension penalty (which is usually 1/10 times the gap opening penalty), as well as a comparison matrix such as PAM 250 or BLOSUM 62 are used in conjunction with the algorithm. In certain embodiments, a standard comparison matrix (see, Dayhoff et al., 1978, Atlas of Protein Sequence and Structure 5:345-352 for the PAM 250 comparison matrix; Henikoff et al., 1992, Proc. Natl. Acad. Sci. U.S.A. 89:10915-10919 for the BLOSUM 62 comparison matrix) is also used by the algorithm.

[0081] Recommended parameters for determining percent identity for polypeptides or nucleotide sequences using the GAP program include the following:
[0082] Algorithm: Needleman et al., 1970, J. Mol. Biol. 48:443-453;
[0083] Comparison matrix: BLOSUM 62 from Henikoff et al., 1992, supra;
[0084] Gap Penalty: 12 (but with no penalty for end gaps)
[0085] Gap Length Penalty: 4
[0086] Threshold of Similarity: 0

[0087] Certain alignment schemes for aligning two amino acid sequences may result in matching of only a short region of the two sequences, and this small aligned region may have very high sequence identity even though there is no significant relationship between the two full-length sequences. Accordingly, the selected alignment method (GAP program) can be adjusted if so desired to result in an alignment that spans at least 50 contiguous amino acids of the target polypeptide.

[0088] In certain embodiments, the bispecific and tetraspecific antigen binding proteins of the invention comprise antibodies. As used herein, the term “antibody” refers to a tetrameric immunoglobulin protein comprising two light chain polypeptides (about 25 kDa each) and two heavy chain polypeptides (about 50-70 kDa each). The term “light chain” or “immunoglobulin light chain” refers to a polypeptide comprising, from amino terminus to carboxyl terminus, a single immunoglobulin light chain variable region (VL) and a single immunoglobulin light chain constant domain (CL). The immunoglobulin light chain constant domain (CL) can be kappa (κ) or lambda (λ). The term “heavy chain” or “immunoglobulin heavy chain” refers to a polypeptide comprising, from amino terminus to carboxyl terminus, a single immunoglobulin heavy chain variable region (VH), an immunoglobulin heavy chain constant domain 1 (CH1), an immunoglobulin hinge region, an immunoglobulin heavy chain constant domain 2 (CH2), an immunoglobulin heavy chain constant domain 3 (CH3), and optionally an immunoglobulin heavy chain constant domain 4 (CH4). Heavy chains are classified as mu (μ), delta (Δ), gamma (γ), alpha (α), and epsilon (ϵ), and define the antibody's isotype as IgM, IgD, IgG, IgA, and IgE, respectively. The IgG-class and IgA-class antibodies are further divided into subclasses, namely, IgG1, IgG2, IgG3, and IgG4, and IgA1 and IgA2, respectively. The heavy chains in IgG, IgA, and IgD antibodies have three domains (CH1, CH2, and CH3), whereas the heavy chains in IgM and IgE antibodies have four domains (CH1, CH2, CH3, and CH4). The immunoglobulin heavy chain constant domains can be from any immunoglobulin isotype, including subtypes. The antibody chains are linked together via inter-polypeptide disulfide bonds between the CL domain and the CH1 domain (i.e. between the light and heavy chain) and between the hinge regions of the antibody heavy chains.

[0089] In particular embodiments, the bispecific and tetraspecific antigen binding proteins of the invention are heterodimeric antibodies (used interchangeably herein with “hetero immunoglobulins” or “hetero Igs”), which refer to antibodies comprising two different light chains and two different heavy chains.

[0090] The heterodimeric antibodies can comprise any immunoglobulin constant region. The term “constant region” as used herein refers to all domains of an antibody other than the variable region. The constant region is not involved directly in binding of an antigen, but exhibits various effector functions. As described above, antibodies are divided into particular isotypes (IgA, IgD, IgE, IgG, and IgM) and subtypes (IgG1, IgG2, IgG3, IgG4, IgA1 IgA2) depending on the amino acid sequence of the constant region of their heavy chains. The light chain constant region can be, for example, a kappa-or lambda-type light chain constant region, e.g., a human kappa-or lambda-type light chain constant region, which are found in all five antibody isotypes. Examples of human immunoglobulin light chain constant region sequences are shown in the following table.

TABLE 4
Exemplary Human Immunoglobulin
Light Chain Constant Regions

| | SEQ | |
|---|---|---|
| Desig- | ID | |
| nation | NO: | CL Domain Amino Acid Sequence |
| CL-1 | 924 | GQPKANPTVTLFPPSSEELQANKATLVCLIS |
| | | DFYPGAVTVAWKADGSPVKAGVETTKPSKQS |
| | | NNKYAASSYLSLTPEQWKSHRSYSCQVTHEG |
| | | STVEKTVAPTECS |
| CL-2 | 925 | GQPKAAPSVTLFPPSSEELQANKATLVCLIS |
| | | DFYPGAVTVAWKADSSPVKAGVETTTPSKQS |
| | | NNKYAASSYLSLTPEQWKSHRSYSCQVTHEG |
| | | STVEKTVAPTECS |
| CL-3 | 926 | GQPKAAPSVTLFPPSSEELQANKATLVCLIS |
| | | DFYPGAVTVAWKADSSPVKAGVETTTPSKQS |
| | | NNKYAASSYLSLTPEQWKSHKSYSCQVTHEG |
| | | STVEKTVAPTECS |
| CL-7 | 927 | GQPKAAPSVTLFPPSSEELQANKATLVCLVS |
| | | DFYPGAVTVAWKADGSPVKVGVETTKPSKQS |
| | | NNKYAASSYLSLTPEQWKSHRSYSCRVTHEG |
| | | STVEKTVAPAECS |

[0091] The heavy chain constant region of the heterodimeric antibodies can be, for example, an alpha-, delta-, epsilon-, gamma-, or mu-type heavy chain constant region, e.g., a human alpha-, delta-, epsilon-, gamma-, or mu-type heavy chain constant region. In some embodiments, the heterodimeric antibodies comprise a heavy chain constant region from an IgG1, IgG2, IgG3, or IgG4 immunoglobulin. In one embodiment, the heterodimeric antibody comprises a heavy chain constant region from a human IgG1 immunoglobulin. In another embodiment, the heterodimeric antibody comprises a heavy chain constant region from a human IgG2 immunoglobulin. Examples of human IgG1 and IgG2 heavy chain constant region sequences are shown below in Table 5.

TABLE 5
Exemplary Human Immunoglobulin
Heavy Chain Constant Regions

| | SEQ | |
|---|---|---|
| Ig | ID | Heavy Chain Constant |
| isotype | NO: | Region Amino Acid Sequence |
| Human | 928 | ASTKGPSVFPLAPSSKSTSGGTAALGCLVKDYFPEPVTVSWNSGALTSGVHTFPAV |
| IgG1z | | LQSSGLYSLSSVVTVPSSSLGTQTYICNVNHKPSNTKVDKKVEPKSCDKTHTCPPCP |
| | | APELLGGPSVFLFPPKPKDTLMISRTPEVTCVVVDVSHEDPEVKFNWYVDGVEVH |
| | | NAKTKPREEQYNSTYRVVSVLTVLHQDWLNGKEYKCKVSNKALPAPIEKTISKAK |
| | | GQPREPQVYTLPPSREEMTKNQVSLTCLVKGFYPSDIAVEWESNGQPENNYKTTPP |
| | | VLDSDGSFFLYSKLTVDKSRWQQGNVFSCSVMHEALHNHYTQKSLSLSPGK |
| Human | 929 | ASTKGPSVFPLAPSSKSTSGGTAALGCLVKDYFPEPVTVSWNSGALTSGVHTFPAV |
| IgG1za | | LQSSGLYSLSSVVTVPSSSLGTQTYICNVNHKPSNTKVDKKVEPKSCDKTHTCPPCP |
| | | APELLGGPSVFLFPPKPKDTLMISRTPEVTCVVVDVSHEDPEVKFNWYVDGVEVH |
| | | NAKTKPREEQYNSTYRVVSVLTVLHQDWLNGKEYKCKVSNKALPAPIEKTISKAK |
| | | GQPREPQVYTLPPSRDELTKNQVSLTCLVKGFYPSDIAVEWESNGQPENNYKTTPP |
| | | VLDSDGSFFLYSKLTVDKSRWQQGNVFSCSVMHEALHNHYTQKSLSLSPGK |
| Human | 930 | ASTKGPSVFPLAPSSKSTSGGTAALGCLVKDYFPEPVTVSWNSGALTSGVHTFPAV |
| IgG1f | | LQSSGLYSLSSVVTVPSSSLGTQTYICNVNHKPSNTKVDKRVEPKSCDKTHTCPPCP |
| | | APELLGGPSVFLFPPKPKDTLMISRTPEVTCVVVDVSHEDPEVKFNWYVDGVEVH |
| | | NAKTKPREEQYNSTYRVVSVLTVLHQDWLNGKEYKCKVSNKALPAPIEKTISKAK |
| | | GQPREPQVYTLPPSREEMTKNQVSLTCLVKGFYPSDIAVEWESNGQPENNYKTTPP |
| | | VLDSDGSFFLYSKLTVDKSRWQQGNVFSCSVMHEALHNHYTQKSLSLSPGK |
| Human | 931 | ASTKGPSVFPLAPSSKSTSGGTAALGCLVKDYFPEPVTVSWNSGALTSGVHTFPAV |
| IgG1fa | | LQSSGLYSLSSVVTVPSSSLGTQTYICNVNHKPSNTKVDKRVEPKSCDKTHTCPPCP |
| | | APELLGGPSVFLFPPKPKDTLMISRTPEVTCVVVDVSHEDPEVKFNWYVDGVEVH |
| | | NAKTKPREEQYNSTYRVVSVLTVLHQDWLNGKEYKCKVSNKALPAPIEKTISKAK |
| | | GQPREPQVYTLPPSRDELTKNQVSLTCLVKGFYPSDIAVEWESNGQPENNYKTTPP |
| | | VLDSDGSFFLYSKLTVDKSRWQQGNVFSCSVMHEALHNHYTQKSLSLSPGK |
| Human | 932 | ASTKGPSVFPLAPCSRSTSESTAALGCLVKDYFPEPVTVSWNSGALTSGVHTFPAV |
| IgG2 | | LQSSGLYSLSSVVTVPSSNFGTQTYTCNVDHKPSNTKVDKTVERKCCVECPPCPAP |
| | | PVAGPSVFLFPPKPKDTLMISRTPEVTCVVVDVSHEDPEVQFNWYVDGVEVHNAK |
| | | TKPREEQFNSTFRVVSVLTVVHQDWLNGKEYKCKVSNKGLPAPIEKTISKTKGQPR |
| | | EPQVYTLPPSREEMTKNQVSLTCLVKGFYPSDIAVEWESNGQPENNYKTTPPMLDS |
| | | DGSFFLYSKLTVDKSRWQQGNVFSCSVMHEALHNHYTQKSLSLSPGK |

[0092] A variable region may be attached to the above light and heavy chain constant regions to form complete antibody light and heavy chains, respectively. Further, each of the so generated heavy and light chain polypeptides may be combined to form a complete bispecific and tetraspecific antibody structure, e.g. a heterodimeric antibody. It should be understood that the heavy chain and light chain variable regions provided herein can also be attached to other constant domains having different sequences than the exemplary sequences listed above.

[0093] In certain embodiments of the invention two different heavy chains are used to form the a heterodimeric molecule of the present invention. To facilitate assembly of the light and heavy chains from into a bispecific and tetraspecific, heterodimeric antibody, the light chains and/or heavy chains from each antibody can be engineered to reduce the formation of mispaired molecules. For example, one approach to promote heterodimer formation over homodimer formation is the so-called “knobs-into-holes” method, which involves introducing mutations into the CH3 domains of two different antibody heavy chains at the contact interface. Specifically, one or more bulky amino acids in one heavy chain are replaced with amino acids having short side chains (e.g. alanine or threonine) to create a “hole,” whereas one or more amino acids with large side chains (e.g. tyrosine or tryptophan) are introduced into the other heavy chain to create a “knob.” When the modified heavy chains are co-expressed, a greater percentage of heterodimers (knob-hole) are formed as compared to homodimers (hole-hole or knob-knob). The “knobs-into-holes” methodology is described in detail in WO 96/027011; Ridgway et al., Protein Eng., Vol. 9:617-621, 1996; and Merchant et al., Nat, Biotechnol., Vol. 16:677-681, 1998, all of which are hereby incorporated by reference in their entireties.

[0094] Another approach for promoting heterodimer formation to the exclusion of homodimer formation entails utilizing an electrostatic steering mechanism (see Gunasekaran et al., J. Biol. Chem., Vol. 285:19637-19646, 2010, which is hereby incorporated by reference in its entirety). This approach involves introducing or exploiting charged residues in the CH3 domain in each heavy chain so that the two different heavy chains associate through opposite charges that cause electrostatic attraction. Homodimerization of the identical heavy chains are disfavored because the identical heavy chains have the same charge and therefore are repelled. This same electrostatic steering technique can be used to prevent mispairing of light chains with the non-cognate heavy chains by introducing residues having opposite charges in the correct light chain-heavy chain pair at the binding interface. The electrostatic steering technique and suitable charge pair mutations for promoting heterodimers and correct light chain/heavy chain pairing is described in WO2009089004 and WO2014081955, both of which are hereby incorporated by reference in their entireties.

[0095] In embodiments in which the bispecific antigen binding proteins of the invention are heterodimeric antibodies comprising a first light chain (LC1) and first heavy chain (HC1) from a first antibody that specifically binds to a first target antigen and a second light chain (LC2) and second heavy chain (HC2) from a second antibody that specifically binds to target 2, HC1 or HC2 may comprise one or more amino acid substitutions to replace a positively-charged amino acid with a negatively-charged amino acid. For instance, in one embodiment, the CH3 domain of HC1 or the CH3 domain of HC2 comprises an amino acid sequence differing from a wild-type IgG amino acid sequence such that one or more positively-charged amino acids (e.g., lysine, histidine and arginine) in the wild-type human IgG amino acid sequence are replaced with one or more negatively-charged amino acids (e.g., aspartic acid and glutamic acid) at the corresponding position(s) in the CH3 domain. In these and other embodiments, amino acids (e.g. lysine) at one or more positions selected from 370, 392 and 409 (EU numbering system) are replaced with a negatively-charged amino acid (e.g., aspartic acid and glutamic acid). An amino acid substitution in an amino acid sequence is typically designated herein with a one-letter abbreviation for the amino acid residue in a particular position, followed by the numerical amino acid position relative to an original sequence of interest, which is then followed by the one-letter symbol for the amino acid residue substituted in. For example, “T30D” symbolizes a substitution of a threonine residue by an aspartate residue at amino acid position 30, relative to the original sequence of interest. Another example, “S218G” symbolizes a substitution of a serine residue by a glycine residue at amino acid position 218, relative to the original amino acid sequence of interest.

[0096] In certain embodiments, HC1 or HC2 of the heterodimeric antibodies may comprise one or more amino acid substitutions to replace a negatively-charged amino acid with a positively-charged amino acid. For instance, in one embodiment, the CH3 domain of HCl or the CH3 domain of HC2 comprises an amino acid sequence differing from wild-type IgG amino acid sequence such that one or more negatively-charged amino acids in the wild-type human IgG amino acid sequence are replaced with one or more positively-charged amino acids at the corresponding position(s) in the CH3 domain. In these and other embodiments, amino acids (e.g., aspartic acid or glutamic acid) at one or more positions selected from 356, 357, and 399 (EU numbering system) of the CH3 domain are replaced with a positively-charged amino acid (e.g., lysine, histidine and arginine).

[0097] In particular embodiments, the heterodimeric antibody comprises a first heavy chain comprising negatively-charged amino acids at positions 392 and 409 (e.g., K392D and K409D substitutions), and a second heavy chain comprising positively-charged amino acids at positions 356 and 399 (e.g., E356K and D399K substitutions). In other particular embodiments, the heterodimeric antibody comprises a first heavy chain comprising negatively-charged amino acids at positions 392, 409, and 370 (e.g., K392D, K409D, and K370D substitutions), and a second heavy chain comprising positively-charged amino acids at positions 356, 399, and 357 (e.g., E356K, D399K, and E357K substitutions). In related embodiments, the first heavy chain is from an anti-first target antigen antibody and the second heavy chain is from an anti-second target antigen antibody.

[0098] To facilitate the association of a particular heavy chain with its cognate light chain, both the heavy and light chains may contain complimentary amino acid substitutions. As used herein, “complimentary amino acid substitutions” refer to a substitution to a positively-charged amino acid in one chain paired with a negatively-charged amino acid substitution in the other chain. For example, in some embodiments, the heavy chain comprises at least one amino acid substitution to introduce a charged amino acid and the corresponding light chain comprises at least one amino acid substitution to introduce a charged amino acid, wherein the charged amino acid introduced into the heavy chain has the opposite charge of the amino acid introduced into the light chain. In certain embodiments, one or more positively-charged residues (e.g., lysine, histidine or arginine) can be introduced into a first light chain (LC1) and one or more negatively-charged residues (e.g., aspartic acid or glutamic acid) can be introduced into the companion heavy chain (HC1) at the binding interface of LC1/HC1, whereas one or more negatively-charged residues (e.g., aspartic acid or glutamic acid) can be introduced into a second light chain (LC2) and one or more positively-charged residues (e.g., lysine, histidine or arginine) can be introduced into the companion heavy chain (HC2) at the binding interface of LC2/HC2. The electrostatic interactions will direct the LC1 to pair with HC1 and LC2 to pair with HC2, as the opposite charged residues (polarity) at the interface attract. The heavy/light chain pairs having the same charged residues (polarity) at an interface (e.g. LC1/HC2 and LC2/HC1) will repel, resulting in suppression of the unwanted HC/LC pairings.

[0099] In these and other embodiments, the CH1 domain of the heavy chain or the CL domain of the light chain comprises an amino acid sequence differing from wild-type IgG amino acid sequence such that one or more positively-charged amino acids in wild-type IgG amino acid sequence is replaced with one or more negatively-charged amino acids. Alternatively, the CH1 domain of the heavy chain or the CL domain of the light chain comprises an amino acid sequence differing from wild-type IgG amino acid sequence such that one or more negatively-charged amino acids in wild-type IgG amino acid sequence is replaced with one or more positively-charged amino acids. In some embodiments, one or more amino acids in the CH1 domain of the first and/or second heavy chain in the heterodimeric antibody at an EU position selected from F126, P127, L128, A141, L145, K147, D148, H168, F170, P171, V173, Q175, S176, S183, V185 and K213 is replaced with a charged amino acid. In certain embodiments, a heavy chain residue for substitution with a negatively-or positively-charged amino acid is S183 (EU numbering system). In some embodiments, S183 is substituted with a positively-charged amino acid. In alternative embodiments, S183 is substituted with a negatively-charged amino acid. For instance, in one embodiment, S183 is substituted with a negatively-charged amino acid (e.g. S183E) in the first heavy chain, and S183 is substituted with a positively-charged amino acid (e.g. S183K) in the second heavy chain.

[0100] In embodiments in which the light chain is a kappa light chain, one or more amino acids in the CL domain of the first and/or second light chain in the heterodimeric antibody at a position (EU numbering in a kappa light chain) selected from F116, F118, S121, D122, E123, Q124, S131, V133, L135, N137, N138, Q160, S162, T164, S174 and S176 is replaced with a charged amino acid. In embodiments in which the light chain is a lambda light chain, one or more amino acids in the CL domain of the first and/or second light chain in the heterodimeric antibody at a position (EU numbering in a lambda chain) selected from T116, F118, S121, E123, E124, K129, T131, V133, L135, S137, E160, T162, S165, Q167, A174, S176 and Y178 is replaced with a charged amino acid. In some embodiments, a residue for substitution with a negatively-or positively-charged amino acid is S176 (EU numbering system) of the CL domain of either a kappa or lambda light chain. In certain embodiments, S176 of the CL domain is replaced with a positively-charged amino acid. In alternative embodiments, S176 of the CL domain is replaced with a negatively-charged amino acid. In one embodiment, S176 is substituted with a positively-charged amino acid (e.g. S176K) in the first light chain, and S176 is substituted with a negatively-charged amino acid (e.g. S176E) in the second light chain.

[0101] In addition to or as an alternative to the complimentary amino acid substitutions in the CH1 and CL domains, the variable regions of the light and heavy chains in the heterodimeric antibody may contain one or more complimentary amino acid substitutions to introduce charged amino acids. For instance, in some embodiments, the VH region of the heavy chain or the VL region of the light chain of a heterodimeric antibody comprises an amino acid sequence differing from wild-type IgG amino acid sequence such that one or more positively-charged amino acids in wild-type IgG amino acid sequence is replaced with one or more negatively-charged amino acids. Alternatively, the VH region of the heavy chain or the VL region of the light chain comprises an amino acid sequence differing from wild-type IgG amino acid sequence such that one or more negatively-charged amino acids in wild-type IgG amino acid sequence is replaced with one or more positively-charged amino acids.

[0102] V region interface residues (i.e., amino acid residues that mediate assembly of the VH and VL regions) within the VH region include EU positions 1, 3, 35, 37, 39, 43, 44, 45, 46, 47, 50, 59, 89, 91, and 93. One or more of these interface residues in the VH region can be substituted with a charged (positively-or negatively-charged) amino acid. In certain embodiments, the amino acid at EU position 39 in the VH region of the first and/or second heavy chain is substituted for a positively-charged amino acid, e.g., lysine. In alternative embodiments, the amino acid at EU position 39 in the VH region of the first and/or second heavy chain is substituted for a negatively-charged amino acid, e.g., glutamic acid. In some embodiments, the amino acid at EU position 39 in the VH region of the first heavy chain is substituted for a negatively-charged amino acid (e.g. G39E), and the amino acid at EU position 39 in the VH region of the second heavy chain is substituted for a positively-charged amino acid (e.g. G39K). In some embodiments, the amino acid at EU position 44 in the VH region of the first and/or second heavy chain is substituted for a positively-charged amino acid, e.g., lysine. In alternative embodiments, the amino acid at EU position 44 in the VH region of the first and/or second heavy chain is substituted for a negatively-charged amino acid, e.g., glutamic acid. In certain embodiments, the amino acid at EU position 44 in the VH region of the first heavy chain is substituted for a negatively-charged amino acid (e.g. G44E), and the amino acid at EU position 44 in the VH region of the second heavy chain is substituted for a positively-charged amino acid (e.g. G44K).

[0103] V region interface residues (i.e., amino acid residues that mediate assembly of the VH and VL regions) within the VL region include EU positions 32, 34, 35, 36, 38, 41, 42, 43, 44, 45, 46, 48, 49, 50, 51, 53, 54, 55, 56, 57, 58, 85, 87, 89, 90, 91, and 100. One or more interface residues in the VL region can be substituted with a charged amino acid, preferably an amino acid that has an opposite charge to those introduced into the VH region of the cognate heavy chain. In some embodiments, the amino acid at EU position 100 in the VL region of the first and/or second light chain is substituted for a positively-charged amino acid, e.g., lysine. In alternative embodiments, the amino acid at EU position 100 in the VL region of the first and/or second light chain is substituted for a negative-charged amino acid, e.g., glutamic acid. In certain embodiments, the amino acid at EU position 100 in the VL region of the first light chain is substituted for a positively-charged amino acid (e.g. G100K), and the amino acid at EU position 100 in the VL region of the second light chain is substituted for a negatively-charged amino acid (e.g. G100E).

[0104] In certain embodiments, a heterodimeric antibody of the invention comprises a first heavy chain and a second heavy chain and a first light chain and a second light chain, wherein the first heavy chain comprises amino acid substitutions at positions 44 (EU), 183 (EU), 392 (EU) and 409 (EU), wherein the second heavy chain comprises amino acid substitutions at positions 44 (EU), 183 (EU), 356 (EU) and 399 (EU), wherein the first and second light chains comprise an amino acid substitution at positions 100 (EU) and 176 (EU), and wherein the amino acid substitutions introduce a charged amino acid at the positions. In related embodiments, the glycine at position 44 (EU) of the first heavy chain is replaced with glutamic acid, the glycine at position 44 (EU) of the second heavy chain is replaced with lysine, the glycine at position 100 (EU) of the first light chain is replaced with lysine, the glycine at position 100 (EU) of the second light chain is replaced with glutamic acid, the serine at position 176 (EU) of the first light chain is replaced with lysine, the serine at position 176 (EU) of the second light chain is replaced with glutamic acid, the serine at position 183 (EU) of the first heavy chain is replaced with glutamic acid, the lysine at position 392 (EU) of the first heavy chain is replaced with aspartic acid, the lysine at position 409 (EU) of the first heavy chain is replaced with aspartic acid, the serine at position 183 (EU) of the second heavy chain is replaced with lysine, the glutamic acid at position 356 (EU) of the second heavy chain is replaced with lysine, and/or the aspartic acid at position 399 (EU) of the second heavy chain is replaced with lysine.

[0105] In other embodiments, a heterodimeric antibody of the invention comprises a first heavy chain and a second heavy chain and a first light chain and a second light chain, wherein the first heavy chain comprises amino acid substitutions at positions 183 (EU), 392 (EU) and 409 (EU), wherein the second heavy chain comprises amino acid substitutions at positions 183 (EU), 356 (EU) and 399 (EU), wherein the first and second light chains comprise an amino acid substitution at position 176 (EU), and wherein the amino acid substitutions introduce a charged amino acid at the positions. In related embodiments, the serine at position 176 (EU) of the first light chain is replaced with lysine, the serine at position 176 (EU) of the second light chain is replaced with glutamic acid, the serine at position 183 (EU) of the first heavy chain is replaced with glutamic acid, the lysine at position 392 (EU) of the first heavy chain is replaced with aspartic acid, the lysine at position 409 (EU) of the first heavy chain is replaced with aspartic acid, the serine at position 183 (EU) of the second heavy chain is replaced with lysine, the glutamic acid at position 356 (EU) of the second heavy chain is replaced with lysine, and/or the aspartic acid at position 399 (EU) of the second heavy chain is replaced with lysine.

[0106] In still other embodiments, a heterodimeric antibody of the invention comprises a first heavy chain and a second heavy chain and a first light chain and a second light chain, wherein the first heavy chain comprises amino acid substitutions at positions 183 (EU), 392 (EU), 409 (EU), and 370 (EU), wherein the second heavy chain comprises amino acid substitutions at positions 183 (EU), 356 (EU), 399 (EU), and 357 (EU), wherein the first and second light chains comprise an amino acid substitution at position 176 (EU), and wherein the amino acid substitutions introduce a charged amino acid at the positions. In related embodiments, the serine at position 176 (EU) of the first light chain is replaced with lysine, the serine at position 176 (EU) of the second light chain is replaced with glutamic acid, the serine at position 183 (EU) of the first heavy chain is replaced with glutamic acid, the lysine at position 392 (EU) of the first heavy chain is replaced with aspartic acid, the lysine at position 409 (EU) of the first heavy chain is replaced with aspartic acid, the lysine at position 370 (EU) of the first heavy chain is replaced with aspartic acid, the serine at position 183 (EU) of the second heavy chain is replaced with lysine, the glutamic acid at position 356 (EU) of the second heavy chain is replaced with lysine, the aspartic acid at position 399 (EU) of the second heavy chain is replaced with lysine, and/or the glutamic acid at position 357 (EU) of the second heavy chain is replaced with lysine.

[0107] Any of the constant domains can be modified to contain one or more of the charge pair mutations described above to facilitate correct assembly of a heterodimeric antibody.

[0108] The inventive heterodimeric antibodies also encompass antibodies comprising the heavy chain(s) and/or light chain(s), where one, two, three, four or five amino acid residues are lacking from the N-terminus or C-terminus, or both, in relation to any one of the heavy and light chains, e.g., due to post-translational modifications resulting from the type of host cell in which the antibodies are expressed. For instance, Chinese Hamster Ovary (CHO) cells frequently cleave off a C-terminal lysine from antibody heavy chains.

[0109] In certain embodiments, the antigen binding proteins of the invention comprise (i) a first binding domain that specifically binds a first target antigen, (ii) a second binding domain that specifically binds to a second target antigen, and (iii) a human immunoglobulin Fc region, wherein one of the binding domains is positioned at the amino terminus of the Fc region and the other binding domain is positioned at the carboxyl terminus of the Fc region. In some such embodiments, each of the first and second binding domains comprises immunoglobulin variable regions. For instance, in certain embodiments, the first binding domain comprises a first light chain variable region (VL1) and a first heavy chain variable region (VH1) from an anti-first target antigen antibody and the second binding domain comprises a second light chain variable region (VL2) and a second heavy chain variable region (VH2) from an anti-second target antigen antibody.

[0110] As used herein, the term “Fc region” refers to the C-terminal region of an immunoglobulin heavy chain which may be generated by papain digestion of an intact antibody. The Fc region of an immunoglobulin generally comprises two constant domains, a CH2 domain and a CH3 domain, and optionally comprises a CH4 domain. In certain embodiments, the Fc region is an Fc region from an IgG1, IgG2, IgG3, or IgG4 immunoglobulin. In some embodiments, the Fc region comprises CH2 and CH3 domains from a human IgG1 or human IgG2 immunoglobulin. The Fc region may retain effector function, such as Clq binding, complement dependent cytotoxicity (CDC), Fc receptor binding, antibody-dependent cell-mediated cytotoxicity (ADCC), and phagocytosis. In other embodiments, the Fc region may be modified to reduce or eliminate effector function as described in further detail herein.

[0111] In certain embodiments of the bispecific antigen binding proteins of the invention, the binding domain positioned at the amino terminus of the Fc region (i.e. the amino-terminal binding domain) is a Fab fragment fused to the amino terminus of the Fc region through a peptide linker described herein or through an immunoglobulin hinge region. An “immunoglobulin hinge region” refers to the amino acid sequence connecting the CH1 domain and the CH2 domain of an immunoglobulin heavy chain. The hinge region of human IgG1 is generally defined as the amino acid sequence from about Glu216 or about Cys226, to about Pro230. Hinge regions of other IgG isotypes may be aligned with the IgG1 sequence by placing the first and last cysteine residues forming inter-heavy chain disulfide bonds in the same positions and are determinable to those of skill in the art. In some embodiments, the amino-terminal binding domain is joined to the amino terminus of the Fc region through a human IgG1 hinge region. In other embodiments, the amino-terminal binding domain is joined to the amino terminus of the Fc region through a human IgG2 hinge region. In one embodiment, the amino-terminal binding domain (e.g. Fab fragment) is fused to the Fc region through the carboxyl terminus of the CH1 region of the Fab.

[0112] As used herein, the term “modified heavy chain” refers to a fusion protein comprising an immunoglobulin heavy chain, particularly a human IgG1 or human IgG2 heavy chain, and a functional antibody fragment (e.g. Fab) or portion thereof (e.g. immunoglobulin light chain or Fd fragment), wherein the fragment or portion thereof is fused at its N-terminus, optionally through a peptide linker, to the C-terminus of the heavy chain.

[0113] In some embodiments of the antigen binding proteins of the invention, the binding domain positioned at the carboxyl terminus of the Fc region (i.e. the carboxyl-terminal binding domain) is a Fab fragment. In such embodiments, the Fab is fused or otherwise connected to the carboxyl terminus of the Fc region (e.g. the carboxyl terminus of the CH3 domain) through a peptide linker through the amino terminus of the VH region of the Fab fragment. Thus, in one embodiment, the Fab is fused to an Fc region through the amino terminus of the VH region of the Fab such that the resulting fusion protein comprises, from N-terminus to C-terminus, a CH2 domain, a CH3 domain, a peptide linker, a VH region, and a CH1 region.

[0114] The peptide linker joining the Fc region to the carboxyl-terminal Fab can be any of the peptide linkers described herein. In particular embodiments, the peptide linker joining the Fc region to the carboxyl-terminal Fab fragment is at least 5 amino acids in length. In other embodiments, the peptide linker joining the Fc region to the carboxyl-terminal Fab fragment is at least 8 amino acids in length. Particularly suitable peptide linkers for joining the Fc region to the carboxyl-terminal Fab fragment are glycine-serine linkers, such as (GlyₓSer)ₙ where x=3 or 4 and n=2, 3, 4, 5 or 6. In one embodiment, the peptide linker connecting the Fc region to the carboxyl-terminal Fab fragment is a L10 (G4S) 2 linker (SEQ ID NO: 10). In another embodiment, the peptide linker connecting the Fc region to the carboxyl-terminal Fab fragment is a L9 or G3SG+S linker (SEQ ID NO: 11).

[0115] In some embodiments of the bispecific antigen binding proteins of the invention in which the carboxyl-terminal binding domain is a Fab fragment, the binding domain positioned at the amino terminus of the Fc region (i.e. the amino-terminal binding domain) is also a Fab fragment. The amino-terminal Fab fragment can be fused to the amino terminus of the Fc region through a peptide linker or an immunoglobulin hinge region described herein. In some embodiments, the amino-terminal Fab fragment is joined to the amino terminus of the Fc region through a human IgG1 hinge region. In other embodiments, the amino-terminal Fab fragment is joined to the amino terminus of the Fc region through a human IgG2 hinge region. In one embodiment, the amino-terminal Fab fragment is fused to the Fc region through the carboxyl terminus of the CH1 region of the Fab.

[0116] In some embodiments, the bispecific antigen binding protein of the invention comprises a first antibody that specifically binds to a first target where one polypeptide chain (e.g. the heavy chain (VH2-CH1)) of a Fab fragment from a second antibody that specifically binds to a second target is fused to the carboxyl terminus of the heavy chain of the first antibody. The bispecific antigen binding protein in such embodiments also comprises a polypeptide chain containing the other half of the Fab fragment from the second antibody (e.g., the light chain (VL2-CL)). This format is referred to herein as the “IgG-Fab” format, and one embodiment of this type of molecule is shown schematically in FIG. 1. Thus, in certain embodiments, the present invention includes a bispecific, multivalent antigen binding protein comprising: (i) a light chain from a first antibody, (ii) a heavy chain from the first antibody, wherein the heavy chain is fused at its carboxyl terminus through a peptide linker to a first polypeptide comprising VH-CH1 domains of a second antibody to form a modified heavy chain, and (iii) a second polypeptide comprising VL-CL domains of the second antibody. When dimerized, the bispecific antigen binding protein is a homohexamer comprising two modified heavy chains, two light chains from the first antibody, and two polypeptide chains containing the other half of the Fab fragment from the second antibody (the Fd fragment). In one embodiment, the first polypeptide, which is fused to the carboxyl terminus of the heavy chain, comprises VH and CH1 domains from the second antibody, and the second polypeptide comprises VL and CL domains from the second antibody.

[0117] Charge pair mutations or complimentary amino acid substitutions as described herein can be introduced into the Fab regions of the first antibody (Fab 1) or second antibody (Fab 2) to promote correct heavy chain-light chain pairing. For instance, in some embodiments, the amino acid at EU position 38 of the VL domain in Fab 1 is replaced with a negatively-charged amino acid (e.g. glutamic acid) and the amino acid at EU position 39 of the VH domain in Fab 1 is replaced with a positively-charged amino acid (e.g. lysine). In other embodiments, the amino acid at EU position 38 of the VL domain in Fab 1 is replaced with a positively-charged amino acid (e.g. lysine) and the amino acid at EU position 39 of the VH domain in Fab 1 is replaced with a negatively-charged amino acid (e.g. glutamic acid). In certain embodiments, the amino acid at EU position 38 of the VL domain in Fab 2 is replaced with a negatively-charged amino acid (e.g. glutamic acid) and the amino acid at EU position 39 of the VH domain in Fab 2 is replaced with a positively-charged amino acid (e.g. lysine). In other embodiments, the amino acid at EU position 38 of the VL domain in Fab 2 is replaced with a positively-charged amino acid (e.g. lysine) and the amino acid at EU position 39 of the VH domain in Fab 2 is replaced with a negatively-charged amino acid (e.g. glutamic acid).

[0118] In embodiments in which the VH-CH1 region (i.e. Fd fragment) from the second antibody is fused to the heavy chain of the first antibody, the heavy chain from the first antibody comprises a S183E mutation (EU numbering), the light chain from the first antibody comprises a S176K mutation (EU numbering), the light chain from the second antibody comprises a S176E mutation (EU numbering), and the Fd region from the second antibody (which is fused to the C-terminus of the heavy chain from the first antibody) comprises a S183K mutation (EU numbering). In other embodiments, the heavy chain from the first antibody comprises a G44E mutation (EU) and S183E mutation (EU numbering), the light chain from the first antibody comprises a G100K mutation (EU) and S176K mutation (EU numbering), the light chain from the second antibody comprises a G100E mutation (EU) and S176E mutation (EU numbering), and the Fd region from the second antibody (which is fused to the C-terminus of the heavy chain from the first antibody) comprises a G44K mutation (EU) and S183K mutation (EU numbering). The charges in the foregoing examples may be reversed so long as the charge on the corresponding light or heavy chain is also reversed so that the correct heavy/light chain pairs have opposite charges.

[0119] In one embodiment the present invention is directed to a bispecific, tetravalent antigen binding protein, comprising:
[0120] a) a first polypeptide comprising a first heavy chain of a first antibody comprising a first heavy chain variable region (VH1) and a first CH1 domain, wherein the first antibody specifically binds to a first antigen, and wherein the first heavy chain is fused through its C-terminus to the N-terminus of a polypeptide comprising a second heavy chain variable region of a second antibody (VH2), wherein the VH2 is fused through its C-terminus to the N-terminus of a second CH1 domain, and wherein the second antibody specifically binds to a second antigen; wherein
   [0121] i) the VH1 or first CH1 domain comprises at least one amino acid substitution to introduce a positively charged amino acid at a residue selected from the group consisting of positions 39, 44, and 183 using EU numbering; and
   [0122] ii) the VH2 or second CH1 domain comprises at least one amino acid substitution to introduce a negatively charged amino acid at a residue selected from the group consisting of a residue that corresponds to positions 39, 44, and 183 using EU numbering; and
[0123] b) a second polypeptide comprising a first light chain of the first antibody of a), wherein the first light chain comprises a first light chain variable region (VL1) and a first CL region; and wherein the VL1 or first CL domain comprises at least one amino acid substitution to introduce a negatively charged amino acid at a residue selected from the group consisting of positions 38, 100, and 176 using EU numbering; and
[0124] c) a third polypeptide comprising a second light chain of the second antibody of a), wherein the second light chain comprises a second light chain variable region (VL2) and a second CL region;. and wherein the VL1 or first CL domain comprises at least one amino acid substitution to introduce a positively charged amino acid at a residue selected from the group consisting of positions 38, 100, and 176 using EU numbering.

[0125] “Corresponds to” as it pertains to the VH2 and second CH1 domain means that the amino acid residues of the VH2 and second CH1 domain are counted from the C-terminus of the first heavy chain if there is no linker. If there is a peptide linker, the amino acid residues of the VH2 and second CH1 domain are counted from the C-terminus of the peptide linker. In neither case are the amino acid residues counted from the N-terminus of the first heavy chain. Rather, for the VH2 and second CH1 domain, counting begins at the first amino acid residue of the VH2 domain. The counting of amino acid residues is performed using the EU or AHo convention.

[0126] In certain embodiments: a) the VH1 or first CH1 domain comprises a mutation selected from the group consisting of Q39K, G44K, and S183K using EU numbering; b) the VH2 or second CH1 domain comprises a mutation selected from the group consisting of Q39E, G44E, and S183E using EU numbering; c) the VL1 or first CL domain comprises a mutation selected from the group consisting of Q38E, G100E, and S176E using EU numbering; and d) the VL2 or second CL domain comprises a mutation selected from the group consisting of Q38K, G100K, and S176K using EU numbering.

[0127] In certain embodiments: a) the first CH1 domain comprises a S183K mutation using EU numbering; b) the second CH1 domain comprises a S183E mutation using EU numbering; c) the first CL domain comprises a S176E mutation using EU numbering; and d) the second CL domain comprises a S176K mutation using EU numbering.

[0128] In certain embodiments: a) the VH1 comprises a Q39K mutation and the first CH1 domain comprises a S183K mutation using EU numbering; b) the VH2 comprises a Q39E mutation and the second CH1 domain comprises a S183E mutation using EU numbering; c) the VL1 comprises a Q38E mutation and the first CL domain comprises a S176E mutation using EU numbering; and d) the VL2 comprises a Q38K mutation and the second CL domain comprises a S176K mutation using EU numbering.

[0129] In certain embodiments: a) the first CH1 domain comprises G44K and S183K mutations using EU numbering; b) the second CH1 domain comprises G44E and S183E mutations using EU numbering; c) the first CL domain comprises G100E and S176E mutations using EU numbering; and d) the second CL domain comprises G100K and S176K mutations using EU numbering.

[0130] In one embodiment the present invention is directed to a bispecific, tetravalent antigen binding protein, comprising:
[0131] a) a first polypeptide comprising a first heavy chain of a first antibody comprising a first heavy chain variable region (VH1) and a first CH1 domain, wherein the first antibody specifically binds to a first antigen, and wherein the first heavy chain is fused through its C-terminus to the N-terminus of a polypeptide comprising a second heavy chain variable region of a second antibody (VH2), wherein the VH2 is fused through its C-terminus to the N-terminus of a second CH1 domain, and wherein the second antibody specifically binds to a second antigen; wherein
   [0132] i) the VH1 or first CH1 domain comprises at least one amino acid substitution to introduce a negatively charged amino acid at a residue selected from the group consisting of positions 39, 44, and 183 using EU numbering; and
   [0133] ii) the VH2 or second CH1 domain comprises at least one amino acid substitution to introduce a positively charged amino acid at a residue selected from the group consisting of a residue that corresponds to positions 39, 44, and 183 using EU numbering; and
[0134] b) a second polypeptide comprising a first light chain of the first antibody of a), wherein the first light chain comprises a first light chain variable region (VL1) and a first CL region; and wherein the VL1 or first CL domain comprises at least one amino acid substitution to introduce a positively charged amino acid at a residue selected from the group consisting of positions 38, 100, and 176 using EU numbering; and
   [0135] c) a third polypeptide comprising a second light chain of the second antibody of a), wherein the second light chain comprises a second light chain variable region (VL2) and a second CL region;. and wherein the VL1 or first CL domain comprises at least one amino acid substitution to introduce a negatively charged amino acid at a residue selected from the group consisting of positions 38, 100, and 176 using EU numbering.

[0136] In certain embodiments: a) the VH1 or first CH1 domain comprises a mutation selected from the group consisting of Q39E, G44E, and S183E using EU numbering; b) the VH2 or second CH1 domain comprises a mutation selected from the group consisting of Q39K, G44K, and S183K using EU numbering; c) the VL1 or first CL domain comprises a mutation selected from the group consisting of Q38K, G100K, and S176K using EU numbering; and d) the VL2 or second CL domain comprises a mutation selected from the group consisting of Q38E, G100E, and S176E using EU numbering.

[0137] In certain embodiments: a) the first CH1 domain comprises a S183E mutation using EU numbering; b) the second CH1 domain comprises a S183K mutation using EU numbering; c) the first CL domain comprises a S176K mutation using EU numbering; and d) the second CL domain comprises a S176E mutation using EU numbering.

[0138] In certain embodiments: a) the VH1 comprises a Q39E mutation and the first CH1 domain comprises a S183E mutation using EU numbering; b) the VH2 comprises a Q39K mutation and the second CH1 domain comprises a S183K mutation using EU numbering; c) the VL1 comprises a Q38K mutation and the first CL domain comprises a S176K mutation using EU numbering; and d) the VL2 comprises a Q38E mutation and the second CL domain comprises a S176E mutation using EU numbering.

[0139] In certain embodiments: a) the first CH1 domain comprises G44E and S183E mutations using EU numbering; b) the second CH1 domain comprises G44K and S183K mutations using EU numbering; c) the first CL domain comprises G100K and S176K mutations using EU numbering; and d) the second CL domain comprises G100E and S176E mutations using EU numbering.

[0140] In one embodiment the present invention is directed to a bispecific, tetravalent antigen binding protein, comprising:
[0141] a) a first polypeptide comprising a first heavy chain of a first antibody comprising a first heavy chain variable region (VH1) and a first CH1 domain, wherein the first antibody specifically binds to a first antigen, and wherein the first heavy chain is fused through its C-terminus to the N-terminus of a polypeptide comprising a second heavy chain variable region of a second antibody (VH2), wherein the VH2 is fused through its C-terminus to the N-terminus of a second CH1 domain, and wherein the second antibody specifically binds to a second antigen; wherein
   [0142] i) the VH1 or first CH1 domain comprises at least one amino acid substitution to introduce a charged amino acid at a residue selected from the group consisting of positions 39, 44, and 183 using EU numbering; and
   [0143] ii) the VH2 or second CH1 domain comprises at least one amino acid substitution to introduce a charged amino acid at a residue selected from the group consisting of a residue that corresponds to positions 39, 44, and 183 using EU numbering, wherein the charge is the opposite of the substituted residue of the VH1 or first CH1 of the first heavy chain; and
[0144] b) a second polypeptide comprising a first light chain of the first antibody of a), wherein the first light chain comprises a first light chain variable region (VL1) and a first CL region; and wherein the VL1 or first CL domain comprises at least one amino acid substitution to introduce a charged amino acid at a residue selected from the group consisting of positions 38, 100, and 176 using EU numbering, wherein
[0145] the charge at position 38 is the opposite of the substituted residue of the VH1 or first CH1 of the first heavy chain at position 39; the charge at position 100 is the opposite of the substituted residue of the VH1 or first CH1 of the first heavy chain at position 44; the charge at position 176 is the opposite of the substituted residue of the VH1 or first CH1 of the first heavy chain at position 183; and
[0146] c) a third polypeptide comprising a second light chain of the second antibody of a), wherein the second light chain comprises a second light chain variable region (VL2) and a second CL region; and wherein the VL2 or second CL domain comprises at least one amino acid substitution to introduce a charged amino acid at a residue selected from the group consisting of positions 38, 100, and 176 using EU numbering, wherein
[0147] the charge at position 38 is the opposite of the substituted residue of the VH2 or second CH1 of the second heavy chain at position 39; the charge at position 100 is the opposite of the substituted residue of the VH2 or second CH1 of the second heavy chain at position 44; the charge at position 176 is the opposite of the substituted residue of the VH2 or second CH1 of the second heavy chain at position 183.

[0148] In certain embodiments: a) the VH1 comprises a Q39E mutation and the first CH1 domain comprises a S183K mutation using EU numbering; b) the VH2 comprises a Q39K mutation and the second CH1 domain comprises a S183E mutation using EU numbering; c) the VL1 comprises a Q38K mutation and the first CL domain comprises a S176E mutation using EU numbering; and d) the VL2 comprises a Q38E mutation and the second CL domain comprises a S176K mutation using EU numbering.

[0149] In certain embodiments: a) the first CH1 domain comprises G44E and S183K mutations using EU numbering; b) the second CH1 domain comprises G44K and S183E mutations using EU numbering; c) the first CL domain comprises G100K and S176E mutations using EU numbering; and d) the second CL domain comprises G100E and S176K mutations using EU numbering.

[0150] In certain embodiments: a) the VH1 comprises a Q39K mutation and the first CH1 domain comprises a S183E mutation using EU numbering; b) the VH2 comprises a Q39E mutation and the second CH1 domain comprises a S183K mutation using EU numbering; c) the VL1 comprises a Q38E mutation and the first CL domain comprises a S176K mutation using EU numbering; and d) the VL2 comprises a Q38K mutation and the second CL domain comprises a S176E mutation using EU numbering.

[0151] In certain embodiments: a) the first CH1 domain comprises G44K and S183E mutations using EU numbering; b) the second CH1 domain comprises G44E and S183K mutations using EU numbering; c) the first CL domain comprises G100E and S176K mutations using EU numbering; and d) the second CL domain comprises G100K and S176E mutations using EU numbering.

[0152] In certain embodiments the first heavy chain is fused to the VH2 via a peptide linker. In certain embodiments the peptide linker comprises a sequence selected from the group consisting of (Gly₃Ser)₂, (Gly₄Ser)₂, (Gly₃Ser)₃, (Gly₄Ser)₃, (Gly₃Ser)₄, (Gly₄Ser)₄, (Gly₃Ser)₅, (Gly₄Ser)₅, (Gly₃Ser)₆, and (Gly₄Ser)₆. These sequences can also be written as GGGSGGGS (SEQ ID NO: 933), GGGGSGGGGS (SEQ ID NO: 934), GGGSGGGSGGGS (SEQ ID NO: 935), GGGGSGGGGSGGGGS (SEQ ID NO: 936), GGGSGGGSGGGSGGGS (SEQ ID NO: 937), GGGGSGGGGSGGGGSGGGGS (SEQ ID NO: 938), GGGSGGGSGGGSGGGSGGGS (SEQ ID NO: 939), GGGGGGGGSGGGGSGGGGSGGGGS (SEQ ID NO: 940), GGGSGGGSGGGSGGGSGGGSGGGS (SEQ ID NO: 941), and GGGGSGGGGSGGGGSGGGGSGGGGSGGGGS (SEQ ID NO: 942).

[0153] In one embodiment the present invention is directed to a method for preparing a bispecific, tetravalent antigen binding protein, comprising:
[0154] 1) co-expressing in a host cell:
   [0155] a) a first polynucleotide wherein the first polynucleotide encodes a first polypeptide comprising a first heavy chain of a first antibody comprising a first heavy chain variable region (VH1) and a first CH1 domain, wherein the first antibody specifically binds to a first antigen, and wherein the first heavy chain is fused through its C-terminus to the N-terminus of a polypeptide comprising a second heavy chain variable region of a second antibody (VH2), wherein the VH2 is fused through its C-terminus to the N-terminus of a second CH1 domain, and wherein the second antibody specifically binds to a second antigen; wherein
      [0156] i) the VH1 or first CH1 domain comprises at least one amino acid substitution to introduce a positively charged amino acid at a residue selected from the group consisting of positions 39, 44, and 183 using EU numbering; and
      [0157] ii) the VH2 or second CH1 domain comprises at least one amino acid substitution to introduce a negatively charged amino acid at a residue selected from the group consisting of a residue that corresponds to positions 39, 44, and 183 using EU numbering; and
   [0158] b) a second polynucleotide wherein the second polynucleotide encodes a second polypeptide comprising a light chain of the first antibody of a), wherein the light chain comprises a first light chain variable region (VL1) and a first CL region; and wherein the VL 1 or first CL domain comprises at least one amino acid substitution to introduce a negatively charged amino acid at a residue selected from the group consisting of positions 38, 100, and 176 using EU numbering;
   [0159] c) a third polynucleotide wherein the third polycucleotide encodes a third polypeptide comprising a light chain of the second antibody of a), wherein the light chain comprises a second light chain variable region (VL2) and a second CL region;. and wherein the VL1 or first CL domain comprises at least one amino acid substitution to introduce a positively charged amino acid at a residue selected from the group consisting of positions 38, 100, and 176 using EU numbering;
[0160] 2) cultivating the host cell under conditions such that the polypeptides are produced; and
[0161] 3) recovering from the host cell the antigen binding protein.

[0162] In one embodiment the present invention is directed to a method for preparing a bispecific, tetravalent antigen binding protein, comprising:
[0163] 1) co-expressing in a host cell:
   [0164] a) a first polynucleotide wherein the first polynucleotide encodes a first polypeptide comprising a first heavy chain of a first antibody comprising a first heavy chain variable region (VH1) and a first CH1 domain, wherein the first antibody specifically binds to a first antigen, and wherein the first heavy chain is fused through its C-terminus to the N-terminus of a polypeptide comprising a second heavy chain variable region of a second antibody (VH2), wherein the VH2 is fused through its C-terminus to the N-terminus of a second CH1 domain, and wherein the second antibody specifically binds to a second antigen; wherein
      [0165] i) the VH1 or first CH1 domain comprises at least one amino acid substitution to introduce a negatively charged amino acid at a residue selected from the group consisting of positions 39, 44, and 183 using EU numbering; and
      [0166] ii) the VH2 or second CH1 domain comprises at least one amino acid substitution to introduce a positively charged amino acid at a residue selected from the group consisting of a residue that corresponds to positions 39, 44, and 183 using EU numbering; and
   [0167] b) a second polynucleotide wherein the second polynucleotide encodes a second polypeptide comprising a first light chain of the first antibody of a), wherein the first light chain comprises a first light chain variable region (VL1) and a first CL region; and wherein the VL1 or first CL domain comprises at least one amino acid substitution to introduce a positively charged amino acid at a residue selected from the group consisting of positions 38, 100, and 176 using EU numbering; and
   [0168] c) a third polynucleotide wherein the third polynucleotide encodes a third polypeptide comprising a second light chain of the second antibody of a), wherein the second light chain comprises a second light chain variable region (VL2) and a second CL region;. and wherein the VL1 or first CL domain comprises at least one amino acid substitution to introduce a negatively charged amino acid at a residue selected from the group consisting of positions 38, 100, and 176 using EU numbering;
[0169] 2) cultivating the host cell under conditions such that the polypeptides are produced; and
[0170] 3) recovering from the host cell the antigen binding protein.

[0171] In one embodiment the present invention is directed to a method for preparing a bispecific, tetravalent antigen binding protein, comprising:
[0172] 1) co-expressing in a host cell:
   [0173] a) a first polynucleotide wherein the first polynucleotide encodes a first polypeptide comprising a first heavy chain of a first antibody comprising a first heavy chain variable region (VH1) and a first CH1 domain, wherein the first antibody specifically binds to a first antigen, and wherein the first heavy chain is fused through its C-terminus to the N-terminus of a polypeptide comprising a second heavy chain variable region of a second antibody (VH2), wherein the VH2 is fused through its C-terminus to the N-terminus of a second CH1domain, and wherein the second antibody specifically binds to a second antigen; wherein
      [0174] i) the VH1 or first CH1 domain comprises at least one amino acid substitution to introduce a charged amino acid at a residue selected from the group consisting of positions 39, 44, and 183 using EU numbering; and
      [0175] ii) the VH2 or second CH1 domain comprises at least one amino acid substitution to introduce a charged amino acid at a residue selected from the group consisting of a residue that corresponds to positions 39, 44, and 183 using EU numbering, wherein the charge is the opposite of the substituted residue of the VH1 or first CH1 of the first heavy chain; and
   [0176] b) a second polynucleotide wherein the second polynucleotide encodes a second polypeptide comprising a light chain of the first antibody of a), wherein the light chain comprises a first light chain variable region (VL1) and a first CL region; and wherein the VL 1 or first CL domain comprises at least one amino acid substitution to introduce a charged amino acid at a residue selected from the group consisting of positions 38, 100, and 176 using EU numbering, wherein
   [0177] the charge at position 38 is the opposite of the substituted residue of the VH1 or first CH1 of the first heavy chain at position 39; the charge at position 100 is the opposite of the substituted residue of the VH1 or first CH1 of the first heavy chain at position 44; the charge at position 176 is the opposite of the substituted residue of the VH1 or first CH1 of the first heavy chain at position 183; and
   [0178] c) a third polynucleotide wherein the third polynucleotide encodes a third polypeptide comprising a light chain of the second antibody of a), wherein the light chain comprises a second light chain variable region (VL2) and a second CL region; and wherein the VL1 or first CL domain comprises at least one amino acid substitution to introduce a positively charged amino acid at a residue selected from the group consisting of positions 38, 100, and 176 using EU numbering, wherein
   [0179] the charge at position 38 is the opposite of the substituted residue of the VH2 or second CH1 of the second heavy chain at position 39; the charge at position 100 is the opposite of the substituted residue of the VH2 or second CH1 of the second heavy chain at position 44; the charge at position 176 is the opposite of the substituted residue of the VH2 or second CH1 of the second heavy chain at position 183;
[0180] 2) cultivating the host cell under conditions such that the polypeptides are produced; and
[0181] 3) recovering from the host cell the antigen binding protein.

[0182] Additionally or alternatively, correct heavy-light chain pairing may be facilitated by swapping the CH1 and CL domains in the carboxyl-terminal Fab binding domain. By way of example, the first polypeptide, which is fused to the carboxyl terminus of the heavy chain, may comprise a VL domain and CH1 domain from the second antibody, and the second polypeptide may comprise a VH domain and CL domain from the second antibody. In another embodiment, the first polypeptide, which is fused to the carboxyl terminus of the heavy chain, may comprise a VH domain and a CL domain from the second antibody, and the second polypeptide may comprise a VL domain and CH1 domain from the second antibody.

[0183] The heavy chain constant regions or the Fc regions of the bispecific antigen binding proteins described herein may comprise one or more amino acid substitutions that affect the glycosylation and/or effector function of the antigen binding protein. One of the functions of the Fc region of an immunoglobulin is to communicate to the immune system when the immunoglobulin binds its target. This is commonly referred to as “effector function.” Communication leads to antibody-dependent cellular cytotoxicity (ADCC), antibody-dependent cellular phagocytosis (ADCP), and/or complement dependent cytotoxicity (CDC). ADCC and ADCP are mediated through the binding of the Fc region to Fc receptors on the surface of cells of the immune system. CDC is mediated through the binding of the Fc with proteins of the complement system, e.g., Clq. In some embodiments, the bispecific antigen binding proteins of the invention comprise one or more amino acid substitutions in the constant region to enhance effector function, including ADCC activity, CDC activity, ADCP activity, and/or the clearance or half-life of the antigen binding protein. Exemplary amino acid substitutions (EU numbering) that can enhance effector function include, but are not limited to, E233L, L234I, L234Y, L235S, G236A, S239D, F243L, F243V, P2471, D280H, K290S, K290E, K290N, K290Y, R292P, E294L, Y296W, S298A, S298D, S298V, S298G, S298T, T299A, Y300L, V305I, Q311M, K326A, K326E, K326W, A330S, A330L, A330M,

[0184] A330F, 1332E, D333A, E333S, E333A, K334A, K334V, A339D, A339Q, P396L, or combinations of any of the foregoing.

[0185] In other embodiments, the bispecific antigen binding proteins of the invention comprise one or more amino acid substitutions in the constant region to reduce effector function. Exemplary amino acid substitutions (EU numbering) that can reduce effector function include, but are not limited to, C220S, C226S, C229S, E233P, L234A, L234V, V234A, L234F, L235A, L235E, G237A, P238S, S267E, H268Q, N297A, N297G, V309L, E318A, L328F, A330S, A331S, P331S or combinations of any of the foregoing.

[0186] Glycosylation can contribute to the effector function of antibodies, particularly IgG1 antibodies. Thus, in some embodiments, the bispecific antigen binding proteins of the invention may comprise one or more amino acid substitutions that affect the level or type of glycosylation of the binding proteins. Glycosylation of polypeptides is typically either N-linked or O-linked. N-linked refers to the attachment of the carbohydrate moiety to the side chain of an asparagine residue. The tri-peptide sequences asparagine-X-serine and asparagine-X-threonine, where X is any amino acid except proline, are the recognition sequences for enzymatic attachment of the carbohydrate moiety to the asparagine side chain. Thus, the presence of either of these tri-peptide sequences in a polypeptide creates a potential glycosylation site. O-linked glycosylation refers to the attachment of one of the sugars N-acetylgalactosamine, galactose, or xylose, to a hydroxyamino acid, most commonly serine or threonine, although 5-hydroxyproline or 5-hydroxylysine may also be used.

[0187] In certain embodiments, glycosylation of the bispecific antigen binding proteins described herein is increased by adding one or more glycosylation sites, e.g., to the Fc region of the binding protein. Addition of glycosylation sites to the antigen binding protein can be conveniently accomplished by altering the amino acid sequence such that it contains one or more of the above-described tri-peptide sequences (for N-linked glycosylation sites). The alteration may also be made by the addition of, or substitution by, one or more serine or threonine residues to the starting sequence (for O-linked glycosylation sites). For ease, the antigen binding protein amino acid sequence may be altered through changes at the DNA level, particularly by mutating the DNA encoding the target polypeptide at preselected bases such that codons are generated that will translate into the desired amino acids.

[0188] The invention also encompasses production of bispecific antigen binding protein molecules with altered carbohydrate structure resulting in altered effector activity, including antigen binding proteins with absent or reduced fucosylation that exhibit improved ADCC activity. Various methods are known in the art to reduce or eliminate fucosylation. For example, ADCC effector activity is mediated by binding of the antibody molecule to the FcγRIII receptor, which has been shown to be dependent on the carbohydrate structure of the N-linked glycosylation at the N297 residue of the CH2 domain. Non-fucosylated antibodies bind this receptor with increased affinity and trigger FcγRIII-mediated effector functions more efficiently than native, fucosylated antibodies. For example, recombinant production of non-fucosylated antibody in CHO cells in which the alpha-1,6-fucosyl transferase enzyme has been knocked out results in antibody with 100-fold increased ADCC activity (see Yamane-Ohnuki et al., Biotechnol Bioeng. 87(5):614-22, 2004). Similar effects can be accomplished through decreasing the activity of alpha-1,6-fucosyl transferase enzyme or other enzymes in the fucosylation pathway, e.g., through siRNA or antisense RNA treatment, engineering cell lines to knockout the enzyme(s), or culturing with selective glycosylation inhibitors (see Rothman et al., Mol Immunol. 26(12):1113-23, 1989). Some host cell strains, e.g. Lec13 or rat hybridoma YB2/0 cell line naturally produce antibodies with lower fucosylation levels (see Shields et al., J Biol Chem. 277(30):26733-40, 2002 and Shinkawa et al., J Biol Chem. 278(5):3466-73, 2003). An increase in the level of bisected carbohydrate, e.g. through recombinantly producing antibody in cells that overexpress GnTIII enzyme, has also been determined to increase ADCC activity (see Umana et al., Nat Biotechnol. 17(2):176-80, 1999).

[0189] In other embodiments, glycosylation of the bispecific antigen binding proteins described herein is decreased or eliminated by removing one or more glycosylation sites, e.g., from the Fc region of the binding protein. Amino acid substitutions that eliminate or alter N-linked glycosylation sites can reduce or eliminate N-linked glycosylation of the antigen binding protein. In certain embodiments, the bispecific antigen binding proteins described herein comprise a mutation at position N297 (EU numbering), such as N297Q, N297A, or N297G. In one particular embodiment, the bispecific antigen binding proteins of the invention comprise a Fc region from a human IgG1 antibody with a N297G mutation. To improve the stability of molecules comprising a N297 mutation, the Fc region of the molecules may be further engineered. For instance, in some embodiments, one or more amino acids in the Fc region are substituted with cysteine to promote disulfide bond formation in the dimeric state. Residues corresponding to V259, A287, R292, V302, L306, V323, or 1332 (EU numbering) of an IgG1 Fc region may thus be substituted with cysteine. In one embodiment, specific pairs of residues are substituted with cysteine such that they preferentially form a disulfide bond with each other, thus limiting or preventing disulfide bond scrambling. In certain embodiments pairs include, but are not limited to, A287C and L306C, V259C and L306C, R292C and V302C, and V323C and 1332C. In particular embodiments, the bispecific antigen binding proteins described herein comprise a Fc region from a human IgG1 antibody with mutations at R292C and V302C. In such embodiments, the Fc region may also comprise a N297G mutation.

[0190] Modifications of the bispecific antigen binding proteins of the invention to increase serum half-life also may desirable, for example, by incorporation of or addition of a salvage receptor binding epitope (e.g., by mutation of the appropriate region or by incorporating the epitope into a peptide tag that is then fused to the antigen binding protein at either end or in the middle, e.g., by DNA or peptide synthesis; see, e.g., WO96/32478) or adding molecules such as PEG or other water soluble polymers, including polysaccharide polymers. The salvage receptor binding epitope preferably constitutes a region wherein any one or more amino acid residues from one or two loops of a Fc region are transferred to an analogous position in the antigen binding protein. In one embodiment, three or more residues from one or two loops of the Fc region are transferred. In one embodiment, the epitope is taken from the CH2 domain of the Fc region (e.g., an IgG Fc region) and transferred to the CH1, CH3, or VH region, or more than one such region, of the antigen binding protein. Alternatively, the epitope is taken from the CH2 domain of the Fc region and transferred to the CL region or VL region, or both, of the antigen binding protein. See International applications WO 97/34631 and WO 96/32478 for a description of Fc variants and their interaction with the salvage receptor.

[0191] The present invention includes one or more isolated nucleic acids encoding the bispecific antigen binding proteins and components thereof described herein. Nucleic acid molecules of the invention include DNA and RNA in both single-stranded and double-stranded form, as well as the corresponding complementary sequences. DNA includes, for example, cDNA, genomic DNA, chemically synthesized DNA, DNA amplified by PCR, and combinations thereof. The nucleic acid molecules of the invention include full-length genes or cDNA molecules as well as a combination of fragments thereof. In one embodiment, the nucleic acids of the invention are derived from human sources, but the invention includes those derived from non-human species, as well.

[0192] Relevant amino acid sequences from an immunoglobulin or region thereof (e.g. variable region, Fc region, etc.) or polypeptide of interest may be determined by direct protein sequencing, and suitable encoding nucleotide sequences can be designed according to a universal codon table. Alternatively, genomic or cDNA encoding monoclonal antibodies from which the binding domains of the bispecific antigen binding proteins of the invention may be derived can be isolated and sequenced from cells producing such antibodies using conventional procedures (e.g., by using oligonucleotide probes that are capable of binding specifically to genes encoding the heavy and light chains of the monoclonal antibodies).

[0193] An “isolated nucleic acid,” which is used interchangeably herein with “isolated polynucleotide,” is a nucleic acid that has been separated from adjacent genetic sequences present in the genome of the organism from which the nucleic acid was isolated, in the case of nucleic acids isolated from naturally-occurring sources. In the case of nucleic acids synthesized enzymatically from a template or chemically, such as PCR products, cDNA molecules, or oligonucleotides for example, it is understood that the nucleic acids resulting from such processes are isolated nucleic acids. An isolated nucleic acid molecule refers to a nucleic acid molecule in the form of a separate fragment or as a component of a larger nucleic acid construct. In one embodiment, the nucleic acids are substantially free from contaminating endogenous material. The nucleic acid molecule has been derived from DNA or RNA isolated at least once in substantially pure form and in a quantity or concentration enabling identification, manipulation, and recovery of its component nucleotide sequences by standard biochemical methods (such as those outlined in Sambrook et al., Molecular Cloning: A Laboratory Manual, 2nd ed., Cold Spring Harbor Laboratory, Cold Spring Harbor, NY (1989)). Such sequences are provided and/or constructed in the form of an open reading frame uninterrupted by internal non-translated sequences, or introns, that are typically present in eukaryotic genes. Sequences of non-translated DNA can be present 5′ or 3′ from an open reading frame, where the same do not interfere with manipulation or expression of the coding region. Unless specified otherwise, the left-hand end of any single-stranded polynucleotide sequence discussed herein is the 5′ end; the left-hand direction of double-stranded polynucleotide sequences is referred to as the 5′ direction. The direction of 5′ to 3′ production of nascent RNA transcripts is referred to as the transcription direction; sequence regions on the DNA strand having the same sequence as the RNA transcript that are 5′ to the 5′ end of the RNA transcript are referred to as “upstream sequences;” sequence regions on the DNA strand having the same sequence as the RNA transcript that are 3′ to the 3′ end of the RNA transcript are referred to as “downstream sequences.”

[0194] The present invention also includes nucleic acids that hybridize under moderately stringent conditions, and highly stringent conditions, to nucleic acids encoding polypeptides as described herein. The basic parameters affecting the choice of hybridization conditions and guidance for devising suitable conditions are set forth by Sambrook,, Fritsch, and Maniatis (1989, Molecular Cloning: A Laboratory Manual, Cold Spring Harbor Laboratory Press, Cold Spring Harbor, N.Y., chapters 9 and 11; and Current Protocols in Molecular Biology, 1995, Ausubel et al., eds., John Wiley & Sons, Inc., sections 2.10 and 6.3-6.4), and can be readily determined by those having ordinary skill in the art based on, for example, the length and/or base composition of the DNA. One way of achieving moderately stringent conditions involves the use of a prewashing solution containing 5×SSC, 0.5% SDS, 1.0 mM EDTA (pH 8.0), hybridization buffer of about 50% formamide, 6×SSC, and a hybridization temperature of about 55° C. (or other similar hybridization solutions, such as one containing about 50% formamide, with a hybridization temperature of about 42° C.), and washing conditions of about 60° C., in 0.5×SSC, 0.1% SDS. Generally, highly stringent conditions are defined as hybridization conditions as above, but with washing at approximately 68° C., 0.2×SSC, 0.1% SDS. SSPE (1×SSPE is 0.15M NaCl, 10 mM NaH₂PO₄, and 1.25 mM EDTA, pH 7.4) can be substituted for SSC (1×SSC is 0.15M NaCl and 15 mM sodium citrate) in the hybridization and wash buffers; washes are performed for 15 minutes after hybridization is complete. It should be understood that the wash temperature and wash salt concentration can be adjusted as necessary to achieve a desired degree of stringency by applying the basic principles that govern hybridization reactions and duplex stability, as known to those skilled in the art and described further below (see, e.g., Sambrook et al., 1989). When hybridizing a nucleic acid to a target nucleic acid of unknown sequence, the hybrid length is assumed to be that of the hybridizing nucleic acid. When nucleic acids of known sequence are hybridized, the hybrid length can be determined by aligning the sequences of the nucleic acids and identifying the region or regions of optimal sequence complementarity. The hybridization temperature for hybrids anticipated to be less than 50 base pairs in length should be 5 to 10° C. less than the melting temperature (Tm) of the hybrid, where Tm is determined according to the following equations. For hybrids less than 18 base pairs in length, Tm (° C.)=2(# of A+T bases)+4(# of G+C bases). For hybrids above 18 base pairs in length, Tm (° C.)=81.5+16.6 (log10 [Na+])+0.41 (% G+C)−(600/N), where N is the number of bases in the hybrid, and [Na+] is the concentration of sodium ions in the hybridization buffer ([Na+] for 1×SSC=0.165M). In one embodiment, each such hybridizing nucleic acid has a length that is at least 15 nucleotides (or at least 18 nucleotides, or at least 20 nucleotides, or at least 25 nucleotides, or at least 30 nucleotides, or at least 40 nucleotides, or at least 50 nucleotides), or at least 25% (or at least 50%, or at least 60%, or at least 70%, or at least 80%) of the length of the nucleic acid of the present invention to which it hybridizes, and has at least 60% sequence identity (or at least 70%, at least 75%, at least 80%, at least 81%, at least 82%, at least 83%, at least 84%, at least 85%, at least 86%, at least 87%, at least 88%, at least 89%, at least 90%, at least 91%, at least 92%, at least 93%, at least 94%, at least 95%, at least 96%, at least 97%, at least 98%, or at least 99%, or at least 99.5%) with the nucleic acid of the present invention to which it hybridizes, where sequence identity is determined by comparing the sequences of the hybridizing nucleic acids when aligned so as to maximize overlap and identity while minimizing sequence gaps as described in more detail above.

[0195] Variants of the antigen binding proteins described herein can be prepared by site-specific mutagenesis of nucleotides in the DNA encoding the polypeptide, using cassette or PCR mutagenesis or other techniques well known in the art, to produce DNA encoding the variant, and thereafter expressing the recombinant DNA in cell culture as outlined herein. However, antigen binding proteins comprising variant CDRs having up to about 100-150 residues may be prepared by in vitro synthesis using established techniques. The variants typically exhibit the same qualitative biological activity as the naturally occurring analogue, e.g., binding to antigen. Such variants include, for example, deletions and/or insertions and/or substitutions of residues within the amino acid sequences of the antigen binding proteins. Any combination of deletion, insertion, and substitution is made to arrive at the final construct, provided that the final construct possesses the desired characteristics. The amino acid changes also may alter post-translational processes of the antigen binding protein, such as changing the number or position of glycosylation sites. In certain embodiments, antigen binding protein variants are prepared with the intent to modify those amino acid residues which are directly involved in epitope binding. In other embodiments, modification of residues which are not directly involved in epitope binding or residues not involved in epitope binding in any way, is desirable, for purposes discussed herein. Mutagenesis within any of the CDR regions and/or framework regions is contemplated. Covariance analysis techniques can be employed by the skilled artisan to design useful modifications in the amino acid sequence of the antigen binding protein. See, e.g., Choulier, et al., Proteins 41:475-484, 2000; Demarest et al., J. Mol. Biol. 335:41-48, 2004; Hugo et al., Protein Engineering 16 (5): 381-86, 2003; Aurora et al., US Patent Publication No. 2008/0318207 A1; Glaser et al., US Patent Publication No. 2009/0048122 A1; Urech et al., WO 2008/110348 A1; Borras et al., WO 2009/000099 A2. Such modifications determined by covariance analysis can improve potency, pharmacokinetic, pharmacodynamic, and/or manufacturability characteristics of an antigen binding protein.

[0196] The nucleic acid sequences of the present invention. As will be appreciated by those in the art, due to the degeneracy of the genetic code, an extremely large number of nucleic acids may be made, all of which encode the CDRs (and heavy and light chains or other components of the antigen binding proteins described herein) of the invention. Thus, having identified a particular amino acid sequence, those skilled in the art could make any number of different nucleic acids, by simply modifying the sequence of one or more codons in a way which does not change the amino acid sequence of the encoded protein.

[0197] The present invention also includes vectors comprising one or more nucleic acids encoding one or more components of the bispecific antigen binding proteins of the invention (e.g. variable regions, light chains, heavy chains, modified heavy chains, and Fd fragments). The term “vector” refers to any molecule or entity (e.g., nucleic acid, plasmid, bacteriophage or virus) used to transfer protein coding information into a host cell. Examples of vectors include, but are not limited to, plasmids, viral vectors, non-episomal mammalian vectors and expression vectors, for example, recombinant expression vectors. The term “expression vector” or “expression construct” as used herein refers to a recombinant DNA molecule containing a desired coding sequence and appropriate nucleic acid control sequences necessary for the expression of the operably linked coding sequence in a particular host cell. An expression vector can include, but is not limited to, sequences that affect or control transcription, translation, and, if introns are present, affect RNA splicing of a coding region operably linked thereto. Nucleic acid sequences necessary for expression in prokaryotes include a promoter, optionally an operator sequence, a ribosome binding site and possibly other sequences. Eukaryotic cells are known to utilize promoters, enhancers, and termination and polyadenylation signals. A secretory signal peptide sequence can also, optionally, be encoded by the expression vector, operably linked to the coding sequence of interest, so that the expressed polypeptide can be secreted by the recombinant host cell, for more facile isolation of the polypeptide of interest from the cell, if desired. For instance, in some embodiments, signal peptide sequences may be appended/fused to the amino terminus of any of the polypeptides sequences of the present invention. In certain embodiments, a signal peptide having the amino acid sequence of MDMRVPAQLLGLLLLWLRGARC (SEQ ID NO: 943) is fused to the amino terminus of any of the polypeptide sequences of the present invention. In other embodiments, a signal peptide having the amino acid sequence of MAWALLLLTLLTQGTGSWA (SEQ ID NO: 944) is fused to the amino terminus of any of the polypeptide sequences of the present invention. In still other embodiments, a signal peptide having the amino acid sequence of MTCSPLLLTLLIHCTGSWA (SEQ ID NO: 945) is fused to the amino terminus of any of the polypeptide sequences of the present invention. Other suitable signal peptide sequences that can be fused to the amino terminus of the polypeptide sequences described herein include: MEAPAQLLFLLLLWLPDTTG (SEQ ID NO: 946), MEWTWRVLFLVAAATGAHS (SEQ ID NO: 947), METPAQLLFLLLLWLPDTTG (SEQ ID NO: 948), METPAQLLFLLLLWLPDTTG (SEQ ID NO: 949), MKHLWFFLLLVAAPRWVLS (SEQ ID NO: 950), and MEWSWVFLFFLSVTTGVHS (SEQ ID NO: 951). Other signal peptides are known to those of skill in the art and may be fused to any of the polypeptide chains of the present invention, for example, to facilitate or optimize expression in particular host cells.

[0198] Typically, expression vectors used in the host cells to produce the bispecific antigen proteins of the invention will contain sequences for plasmid maintenance and for cloning and expression of exogenous nucleotide sequences encoding the components of the bispecific antigen binding proteins. Such sequences, collectively referred to as “flanking sequences,” in certain embodiments will typically include one or more of the following nucleotide sequences: a promoter, one or more enhancer sequences, an origin of replication, a transcriptional termination sequence, a complete intron sequence containing a donor and acceptor splice site, a sequence encoding a leader sequence for polypeptide secretion, a ribosome binding site, a polyadenylation sequence, a polylinker region for inserting the nucleic acid encoding the polypeptide to be expressed, and a selectable marker element. Each of these sequences is discussed below.

[0199] Optionally, the vector may contain a “tag”-encoding sequence, i.e., an oligonucleotide molecule located at the 5′ or 3′ end of the polypeptide coding sequence; the oligonucleotide tag sequence encodes polyHis (such as hexaHis), FLAG, HA (hemaglutinin influenza virus), myc, or another “tag” molecule for which commercially available antibodies exist. This tag is typically fused to the polypeptide upon expression of the polypeptide, and can serve as a means for affinity purification or detection of the polypeptide from the host cell. Affinity purification can be accomplished, for example, by column chromatography using antibodies against the tag as an affinity matrix. Optionally, the tag can subsequently be removed from the purified polypeptide by various means such as using certain peptidases for cleavage.

[0200] Flanking sequences may be homologous (i.e., from the same species and/or strain as the host cell), heterologous (i.e., from a species other than the host cell species or strain), hybrid (i.e., a combination of flanking sequences from more than one source), synthetic or native. As such, the source of a flanking sequence may be any prokaryotic or eukaryotic organism, any vertebrate or invertebrate organism, or any plant, provided that the flanking sequence is functional in, and can be activated by, the host cell machinery.

[0201] Flanking sequences useful in the vectors of this invention may be obtained by any of several methods well known in the art. Typically, flanking sequences useful herein will have been previously identified by mapping and/or by restriction endonuclease digestion and can thus be isolated from the proper tissue source using the appropriate restriction endonucleases. In some cases, the full nucleotide sequence of a flanking sequence may be known. Here, the flanking sequence may be synthesized using routine methods for nucleic acid synthesis or cloning.

[0202] Whether all or only a portion of the flanking sequence is known, it may be obtained using polymerase chain reaction (PCR) and/or by screening a genomic library with a suitable probe such as an oligonucleotide and/or flanking sequence fragment from the same or another species. Where the flanking sequence is not known, a fragment of DNA containing a flanking sequence may be isolated from a larger piece of DNA that may contain, for example, a coding sequence or even another gene or genes. Isolation may be accomplished by restriction endonuclease digestion to produce the proper DNA fragment followed by isolation using agarose gel purification, Qiagen® column chromatography (Chatsworth, CA), or other methods known to the skilled artisan. The selection of suitable enzymes to accomplish this purpose will be readily apparent to one of ordinary skill in the art.

[0203] An origin of replication is typically a part of those prokaryotic expression vectors purchased commercially, and the origin aids in the amplification of the vector in a host cell. If the vector of choice does not contain an origin of replication site, one may be chemically synthesized based on a known sequence, and ligated into the vector. For example, the origin of replication from the plasmid pBR322 (New England Biolabs, Beverly, MA) is suitable for most gram-negative bacteria, and various viral origins (e.g., SV40, polyoma, adenovirus, vesicular stomatitus virus (VSV), or papillomaviruses such as HPV or BPV) are useful for cloning vectors in mammalian cells. Generally, the origin of replication component is not needed for mammalian expression vectors (for example, the SV40 origin is often used only because it also contains the virus early promoter).

[0204] A transcription termination sequence is typically located 3′ to the end of a polypeptide coding region and serves to terminate transcription. Usually, a transcription termination sequence in prokaryotic cells is a G-C rich fragment followed by a poly-T sequence. While the sequence is easily cloned from a library or even purchased commercially as part of a vector, it can also be readily synthesized using known methods for nucleic acid synthesis.

[0205] A selectable marker gene encodes a protein necessary for the survival and growth of a host cell grown in a selective culture medium. Typical selection marker genes encode proteins that (a) confer resistance to antibiotics or other toxins, e.g., ampicillin, tetracycline, or kanamycin for prokaryotic host cells; (b) complement auxotrophic deficiencies of the cell; or (c) supply critical nutrients not available from complex or defined media. Specific selectable markers are the kanamycin resistance gene, the ampicillin resistance gene, and the tetracycline resistance gene. Advantageously, a neomycin resistance gene may also be used for selection in both prokaryotic and eukaryotic host cells.

[0206] Other selectable genes may be used to amplify the gene that will be expressed. Amplification is the process wherein genes that are required for production of a protein critical for growth or cell survival are reiterated in tandem within the chromosomes of successive generations of recombinant cells. Examples of suitable selectable markers for mammalian cells include dihydrofolate reductase (DHFR) and promoterless thymidine kinase genes. Mammalian cell transformants are placed under selection pressure wherein only the transformants are uniquely adapted to survive by virtue of the selectable gene present in the vector. Selection pressure is imposed by culturing the transformed cells under conditions in which the concentration of selection agent in the medium is successively increased, thereby leading to the amplification of both the selectable gene and the DNA that encodes another gene, such as one or more components of the bispecific antigen binding proteins described herein. As a result, increased quantities of a polypeptide are synthesized from the amplified DNA.

[0207] A ribosome-binding site is usually necessary for translation initiation of mRNA and is characterized by a Shine-Dalgarno sequence (prokaryotes) or a Kozak sequence (eukaryotes). The element is typically located 3′ to the promoter and 5′ to the coding sequence of the polypeptide to be expressed. In certain embodiments, one or more coding regions may be operably linked to an internal ribosome binding site (IRES), allowing translation of two open reading frames from a single RNA transcript.

[0208] In some cases, such as where glycosylation is desired in a eukaryotic host cell expression system, one may manipulate the various pre-or prosequences to improve glycosylation or yield. For example, one may alter the peptidase cleavage site of a particular signal peptide, or add prosequences, which also may affect glycosylation. The final protein product may have, in the −1 position (relative to the first amino acid of the mature protein) one or more additional amino acids incident to expression, which may not have been totally removed. For example, the final protein product may have one or two amino acid residues found in the peptidase cleavage site, attached to the amino-terminus. Alternatively, use of some enzyme cleavage sites may result in a slightly truncated form of the desired polypeptide, if the enzyme cuts at such area within the mature polypeptide.

[0209] Expression and cloning vectors of the invention will typically contain a promoter that is recognized by the host organism and operably linked to the molecule encoding the polypeptide. The term “operably linked” as used herein refers to the linkage of two or more nucleic acid sequences in such a manner that a nucleic acid molecule capable of directing the transcription of a given gene and/or the synthesis of a desired protein molecule is produced. For example, a control sequence in a vector that is “operably linked” to a protein coding sequence is ligated thereto so that expression of the protein coding sequence is achieved under conditions compatible with the transcriptional activity of the control sequences. More specifically, a promoter and/or enhancer sequence, including any combination of cis-acting transcriptional control elements is operably linked to a coding sequence if it stimulates or modulates the transcription of the coding sequence in an appropriate host cell or other expression system.

[0210] Promoters are untranscribed sequences located upstream (i.e., 5′) to the start codon of a structural gene (generally within about 100 to 1000 bp) that control transcription of the structural gene. Promoters are conventionally grouped into one of two classes: inducible promoters and constitutive promoters. Inducible promoters initiate increased levels of transcription from DNA under their control in response to some change in culture conditions, such as the presence or absence of a nutrient or a change in temperature. Constitutive promoters, on the other hand, uniformly transcribe a gene to which they are operably linked, that is, with little or no control over gene expression. A large number of promoters, recognized by a variety of potential host cells, are well known. A suitable promoter is operably linked to the DNA encoding e.g., heavy chain, light chain, modified heavy chain, or other component of the bispecific antigen binding proteins of the invention, by removing the promoter from the source DNA by restriction enzyme digestion and inserting the desired promoter sequence into the vector.

[0211] Suitable promoters for use with yeast hosts are also well known in the art. Yeast enhancers are advantageously used with yeast promoters. Suitable promoters for use with mammalian host cells are well known and include, but are not limited to, those obtained from the genomes of viruses such as polyoma virus, fowlpox virus, adenovirus (such as Adenovirus 2), bovine papilloma virus, avian sarcoma virus, cytomegalovirus, retroviruses, hepatitis-B virus and Simian Virus 40 (SV40). Other suitable mammalian promoters include heterologous mammalian promoters, for example, heat-shock promoters and the actin promoter.

[0212] Additional promoters which may be of interest include, but are not limited to: SV40 early promoter (Benoist and Chambon, 1981, Nature 290:304-310); CMV promoter (Thornsen et al., 1984, Proc. Natl. Acad. U.S.A. 81:659-663); the promoter contained in the 3′ long terminal repeat of Rous sarcoma virus (Yamamoto et al., 1980, Cell 22:787-797); herpes thymidine kinase promoter (Wagner et al., 1981, Proc. Natl. Acad. Sci. U.S.A. 78:1444-1445); promoter and regulatory sequences from the metallothionine gene Prinster et al., 1982, Nature 296:39-42); and prokaryotic promoters such as the beta-lactamase promoter (Villa-Kamaroff et al., 1978, Proc. Natl. Acad. Sci. U.S.A. 75:3727-3731); or the tac promoter (DeBoer et al., 1983, Proc. Natl. Acad. Sci. U.S.A. 80:21-25). Also of interest are the following animal transcriptional control regions, which exhibit tissue specificity and have been utilized in transgenic animals: the elastase I gene control region that is active in pancreatic acinar cells (Swift et al., 1984, Cell 38:639-646; Ornitz et al., 1986, Cold Spring Harbor Symp. Quant. Biol. 50:399-409; MacDonald, 1987, Hepatology 7:425-515); the insulin gene control region that is active in pancreatic beta cells (Hanahan, 1985, Nature 315:115-122); the immunoglobulin gene control region that is active in lymphoid cells (Grosschedl et al., 1984, Cell 38:647-658; Adames et al., 1985, Nature 318:533-538; Alexander et al., 1987, Mol. Cell. Biol. 7:1436-1444); the mouse mammary tumor virus control region that is active in testicular, breast, lymphoid and mast cells (Leder et al., 1986, Cell 45:485-495); the albumin gene control region that is active in liver (Pinkert et al., 1987, Genes and Devel. 1:268-276); the alpha-feto-protein gene control region that is active in liver (Krumlauf et al., 1985, Mol. Cell. Biol. 5:1639-1648; Hammer et al., 1987, Science 253:53-58); the alpha 1-antitrypsin gene control region that is active in liver (Kelsey et al., 1987, Genes and Devel. 1:161-171); the beta-globin gene control region that is active in myeloid cells (Mogram et al, 1985, Nature 315:338-340; Kollias et al, 1986, Cell 46:89-94); the myelin basic protein gene control region that is active in oligodendrocyte cells in the brain (Readhead et al., 1987, Cell 48:703-712); the myosin light chain-2 gene control region that is active in skeletal muscle (Sani, 1985, Nature 314:283-286); and the gonadotropic releasing hormone gene control region that is active in the hypothalamus (Mason et al., 1986, Science 234:1372-1378).

[0213] An enhancer sequence may be inserted into the vector to increase transcription of DNA encoding a component of the bispecific antigen binding proteins (e.g., light chain, heavy chain, modified heavy chain, Fd fragment) by higher eukaryotes. Enhancers are cis-acting elements of DNA, usually about 10-300 bp in length, that act on the promoter to increase transcription. Enhancers are relatively orientation and position independent, having been found at positions both 5′ and 3′ to the transcription unit. Several enhancer sequences available from mammalian genes are known (e.g., globin, elastase, albumin, alpha-feto-protein and insulin). Typically, however, an enhancer from a virus is used. The SV40 enhancer, the cytomegalovirus early promoter enhancer, the polyoma enhancer, and adenovirus enhancers known in the art are exemplary enhancing elements for the activation of eukaryotic promoters. While an enhancer may be positioned in the vector either 5′ or 3′ to a coding sequence, it is typically located at a site 5′ from the promoter. A sequence encoding an appropriate native or heterologous signal sequence (leader sequence or signal peptide) can be incorporated into an expression vector, to promote extracellular secretion of the antibody. The choice of signal peptide or leader depends on the type of host cells in which the antibody is to be produced, and a heterologous signal sequence can replace the native signal sequence. Examples of signal peptides are described above. Other signal peptides that are functional in mammalian host cells include the signal sequence for interleukin-7 (IL-7) described in U.S. Pat. No. 4,965,195; the signal sequence for interleukin-2 receptor described in Cosman et al., 1984, Nature 312:768; the interleukin-4 receptor signal peptide described in EP Patent No. 0367 566; the type I interleukin-1 receptor signal peptide described in U.S. Pat. No. 4,968,607; the type II interleukin-1 receptor signal peptide described in EP Patent No. 0 460 846.

[0214] The expression vectors that are provided may be constructed from a starting vector such as a commercially available vector. Such vectors may or may not contain all of the desired flanking sequences. Where one or more of the flanking sequences described herein are not already present in the vector, they may be individually obtained and ligated into the vector. Methods used for obtaining each of the flanking sequences are well known to one skilled in the art. The expression vectors can be introduced into host cells to thereby produce proteins, including fusion proteins, encoded by nucleic acids as described herein.

[0215] In certain embodiments, nucleic acids encoding the different components of the bispecific antigen binding proteins of the invention may be inserted into the same expression vector. For instance, the nucleic acid encoding an anti-first target antigen light chain can be cloned into the same vector as the nucleic acid encoding an anti-first target antigen heavy chain. In such embodiments, the two nucleic acids may be separated by an internal ribosome entry site (IRES) and under the control of a single promoter such that the light chain and heavy chain are expressed from the same mRNA transcript. Alternatively, the two nucleic acids may be under the control of two separate promoters such that the light chain and heavy chain are expressed from two separate mRNA transcripts. In some embodiments, nucleic acids encoding the anti-first target antigen light chain and heavy chain are cloned into one expression vector and the nucleic acids encoding the anti-second target antigen light chain and heavy chain are cloned into a second expression vector.

[0216] Similarly, for IgG-Fab bispecific antigen binding proteins, nucleic acids encoding each of the three components may be cloned into the same expression vector. In some embodiments, the nucleic acid encoding the light chain of the IgG-Fab molecule and the nucleic acid encoding the second polypeptide (which comprises the other half of the C-terminal Fab domain) are cloned into one expression vector, whereas the nucleic acid encoding the modified heavy chain (fusion protein comprising a heavy chain and half of a Fab domain) is cloned into a second expression vector. In certain embodiments, all components of the bispecific antigen binding proteins described herein are expressed from the same host cell population. For example, even if one or more components is cloned into a separate expression vector, the host cell is co-transfected with both expression vectors such that one cell produces all components of the bispecific antigen binding proteins.

[0217] After the vector has been constructed and the one or more nucleic acid molecules encoding the components of the bispecific antigen binding proteins described herein has been inserted into the proper site(s) of the vector or vectors, the completed vector(s) may be inserted into a suitable host cell for amplification and/or polypeptide expression. Thus, the present invention encompasses an isolated host cell comprising one or more expression vectors encoding the components of the bispecific antigen binding proteins. The term “host cell” as used herein refers to a cell that has been transformed, or is capable of being transformed, with a nucleic acid and thereby expresses a gene of interest. The term includes the progeny of the parent cell, whether or not the progeny is identical in morphology or in genetic make-up to the original parent cell, so long as the gene of interest is present. A host cell that comprises an isolated nucleic acid of the invention, in one embodiment operably linked to at least one expression control sequence (e.g. promoter or enhancer), is a “recombinant host cell.”

[0218] The transformation of an expression vector for an antigen binding protein into a selected host cell may be accomplished by well-known methods including transfection, infection, calcium phosphate co-precipitation, electroporation, microinjection, lipofection, DEAE-dextran mediated transfection, or other known techniques. The method selected will in part be a function of the type of host cell to be used. These methods and other suitable methods are well known to the skilled artisan, and are set forth, for example, in Sambrook et al., 2001, supra.

[0219] A host cell, when cultured under appropriate conditions, synthesizes an antigen binding protein that can subsequently be collected from the culture medium (if the host cell secretes it into the medium) or directly from the host cell producing it (if it is not secreted). The selection of an appropriate host cell will depend upon various factors, such as desired expression levels, polypeptide modifications that are desirable or necessary for activity (such as glycosylation or phosphorylation) and ease of folding into a biologically active molecule.

[0220] Exemplary host cells include prokaryote, yeast, or higher eukaryote cells. Prokaryotic host cells include eubacteria, such as Gram-negative or Gram-positive organisms, for example, Enterobacteriaceae such as Escherichia, e.g., E. coli, Enterobacter, Erwinia, Klebsiella, Proteus, Salmonella, e.g., Salmonella typhimurium, Serratia, e.g., Serratia marcescans, and Shigella, as well as Bacillus, such as B. subtilis and B. licheniformis, Pseudomonas, and Streptomyces. Eukaryotic microbes such as filamentous fungi or yeast are suitable cloning or expression hosts for recombinant polypeptides. Saccharomyces cerevisiae, or common baker's yeast, is the most commonly used among lower eukaryotic host microorganisms. However, a number of other genera, species, and strains are commonly available and useful herein, such as Pichia, e.g. P. pastoris, Schizosaccharomyces pombe; Kluyveromyces, Yarrowia; Candida; Trichoderma reesia; Neurospora crassa; Schwanniomyces, such as Schwanniomyces occidentalis; and filamentous fungi, such as, e.g., Neurospora, Penicillium, Tolypocladium, and Aspergillus hosts such as A. nidulans and A. niger.

[0221] Host cells for the expression of glycosylated antigen binding proteins can be derived from multicellular organisms. Examples of invertebrate cells include plant and insect cells. Numerous baculoviral strains and variants and corresponding permissive insect host cells from hosts such as Spodoptera frugiperda (caterpillar), Aedes aegypti (mosquito), Aedes albopictus (mosquito), Drosophila melanogaster (fruitfly), and Bombyx mori have been identified. A variety of viral strains for transfection of such cells are publicly available, e.g., the L-1 variant of Autographa californica NPV and the Bm-5 strain of Bombyx mori NPV.

[0222] Vertebrate host cells are also suitable hosts, and recombinant production of antigen binding proteins from such cells has become routine procedure. Mammalian cell lines available as hosts for expression are well known in the art and include, but are not limited to, immortalized cell lines available from the American Type Culture Collection (ATCC), including but not limited to Chinese hamster ovary (CHO) cells, including CHOK1 cells (ATCC CCL61), DXB-11, DG-44, and Chinese hamster ovary cells/-DHFR (CHO, Urlaub et al., Proc. Natl. Acad. Sci. USA 77:4216, 1980); monkey kidney CVI line transformed by SV40 (COS-7, ATCC CRL 1651); human embryonic kidney line (293 or 293 cells subcloned for growth in suspension culture, (Graham et al., J. Gen Virol. 36:59, 1977); baby hamster kidney cells (BHK, ATCC CCL 10); mouse sertoli cells (TM4, Mather, Biol. Reprod. 23:243-251, 1980); monkey kidney cells (CV1 ATCC CCL 70); African green monkey kidney cells (VERO-76, ATCC CRL-1587); human cervical carcinoma cells (HELA, ATCC CCL 2); canine kidney cells (MDCK, ATCC CCL 34); buffalo rat liver cells (BRL 3A, ATCC CRL 1442); human lung cells (W138, ATCC CCL 75); human hepatoma cells (Hep G2, HB 8065); mouse mammary tumor (MMT 060562, ATCC CCL51); TRI cells (Mather et al., Annals N.Y Acad. Sci. 383:44-68, 1982); MRC 5 cells or FS4 cells; mammalian myeloma cells, and a number of other cell lines. In certain embodiments, cell lines may be selected through determining which cell lines have high expression levels and constitutively produce bispecific antigen binding proteins of the present invention. In another embodiment, a cell line from the B cell lineage that does not make its own antibody but has a capacity to make and secrete a heterologous antibody can be selected. CHO cells are host cells in some embodiments for expressing the bispecific antigen binding proteins of the invention.

[0223] Host cells are transformed or transfected with the above-described nucleic acids or vectors for production of bispecific antigen binding proteins and are cultured in conventional nutrient media modified as appropriate for inducing promoters, selecting transformants, or amplifying the genes encoding the desired sequences. In addition, novel vectors and transfected cell lines with multiple copies of transcription units separated by a selective marker are particularly useful for the expression of antigen binding proteins. Thus, the present invention also provides a method for preparing a bispecific antigen binding protein described herein comprising culturing a host cell comprising one or more expression vectors described herein in a culture medium under conditions permitting expression of the bispecific antigen binding protein encoded by the one or more expression vectors; and recovering the bispecific antigen binding protein from the culture medium.

[0224] The host cells used to produce the antigen binding proteins of the invention may be cultured in a variety of media. Commercially available media such as Ham's F10 (Sigma), Minimal Essential Medium ((MEM), (Sigma), RPMI-1640 (Sigma), and Dulbecco's Modified Eagle's Medium ((DMEM), Sigma) are suitable for culturing the host cells. In addition, any of the media described in Ham et al., Meth. Enz. 58:44, 1979; Barnes et al., Anal. Biochem. 102:255, 1980; U.S. Pat. Nos. 4,767,704; 4,657,866; 4,927,762; 4,560,655; or 5,122,469; WO90103430; WO 87/00195; or U.S. Patent Re. No. 30,985 may be used as culture media for the host cells. Any of these media may be supplemented as necessary with hormones and/or other growth factors (such as insulin, transferrin, or epidermal growth factor), salts (such as sodium chloride, calcium, magnesium, and phosphate), buffers (such as HEPES), nucleotides (such as adenosine and thymidine), antibiotics (such as Gentamycin™ drug), trace elements (defined as inorganic compounds usually present at final concentrations in the micromolar range), and glucose or an equivalent energy source. Any other necessary supplements may also be included at appropriate concentrations that would be known to those skilled in the art. The culture conditions, such as temperature, pH, and the like, are those previously used with the host cell selected for expression, and will be apparent to the ordinarily skilled artisan.

[0225] Upon culturing the host cells, the bispecific antigen binding protein can be produced intracellularly, in the periplasmic space, or directly secreted into the medium. If the antigen binding protein is produced intracellularly, as a first step, the particulate debris, either host cells or lysed fragments, is removed, for example, by centrifugation or ultrafiltration. The bispecifc antigen binding protein can be purified using, for example, hydroxyapatite chromatography, cation or anion exchange chromatography, or affinity chromatography, using the antigen(s) of interest or protein A or protein G as an affinity ligand. Protein A can be used to purify proteins that include polypeptides that are based on human γ1, γ2, or γ4 heavy chains (Lindmark et al., J. Immunol. Meth. 62:1-13, 1983). Protein G is recommended for all mouse isotypes and for human γ3 (Guss et al., EMBO J. 5:15671575, 1986). The matrix to which the affinity ligand is attached is most often agarose, but other matrices are available. Mechanically stable matrices such as controlled pore glass or poly (styrenedivinyl) benzene allow for faster flow rates and shorter processing times than can be achieved with agarose. Where the protein comprises a CH3 domain, the Bakerbond ABXTM resin (J. T. Baker, Phillipsburg, N.J.) is useful for purification. Other techniques for protein purification such as ethanol precipitation, Reverse Phase HPLC, chromatofocusing, SDS-PAGE, and ammonium sulfate precipitation are also possible depending on the particular bispecific antigen binding protein to be recovered.

[0226] In some embodiments, the invention provides a pharmaceutical composition comprising one or a plurality of the bispecific antigen binding proteins of the invention together with pharmaceutically acceptable diluents, carriers, excipients, solubilizers, emulsifiers, preservatives, and/or adjuvants. Pharmaceutical compositions of the invention include, but are not limited to, liquid, frozen, and lyophilized compositions. “Pharmaceutically-acceptable” refers to molecules, compounds, and compositions that are non-toxic to human recipients at the dosages and concentrations employed and/or do not produce allergic or adverse reactions when administered to humans. In certain embodiments, the pharmaceutical composition may contain formulation materials for modifying, maintaining or preserving, for example, the pH, osmolarity, viscosity, clarity, color, isotonicity, odor, sterility, stability, rate of dissolution or release, adsorption or penetration of the composition. In such embodiments, suitable formulation materials include, but are not limited to, amino acids (such as glycine, glutamine, asparagine, arginine or lysine); antimicrobials; antioxidants (such as ascorbic acid, sodium sulfite or sodium hydrogen-sulfite); buffers (such as borate, bicarbonate, Tris-HCl, citrates, phosphates or other organic acids); bulking agents (such as mannitol or glycine); chelating agents (such as ethylenediamine tetraacetic acid (EDTA)); complexing agents (such as caffeine, polyvinylpyrrolidone, beta-cyclodextrin or hydroxypropyl-beta-cyclodextrin); fillers; monosaccharides; disaccharides; and other carbohydrates (such as glucose, mannose or dextrins); proteins (such as serum albumin, gelatin or immunoglobulins); coloring, flavoring and diluting agents; emulsifying agents; hydrophilic polymers (such as polyvinylpyrrolidone); low molecular weight polypeptides; salt-forming counterions (such as sodium); preservatives (such as benzalkonium chloride, benzoic acid, salicylic acid, thimerosal, phenethyl alcohol, methylparaben, propylparaben, chlorhexidine, sorbic acid or hydrogen peroxide); solvents (such as glycerin, propylene glycol or polyethylene glycol); sugar alcohols (such as mannitol or sorbitol); suspending agents; surfactants or wetting agents (such as pluronics, PEG, sorbitan esters, polysorbates such as polysorbate 20, polysorbate 80, triton, tromethamine, lecithin, cholesterol, tyloxapal); stability enhancing agents (such as sucrose or sorbitol); tonicity enhancing agents (such as alkali metal halides, sodium or potassium chloride, mannitol sorbitol); delivery vehicles; diluents; excipients and/or pharmaceutical adjuvants. Methods and suitable materials for formulating molecules for therapeutic use are known in the pharmaceutical arts, and are described, for example, in REMINGTON'S PHARMACEUTICAL SCIENCES, 18th Edition, (A. R. Genrmo, ed.), 1990, Mack Publishing Company.

[0227] In some embodiments, the pharmaceutical composition of the invention comprises a standard pharmaceutical carrier, such as a sterile phosphate buffered saline solution, bacteriostatic water, and the like. A variety of aqueous carriers may be used, e.g., water, buffered water, 0.4% saline, 0.3% glycine and the like, and may include other proteins for enhanced stability, such as albumin, lipoprotein, globulin, etc., subjected to mild chemical modifications or the like.

[0228] Exemplary concentrations of the bispecific antigen binding proteins in the formulation may range from about 0.1 mg/ml to about 180 mg/ml or from about 0.1 mg/mL to about 50 mg/mL, or from about 0.5 mg/mL to about 25 mg/mL, or alternatively from about 2 mg/mL to about 10 mg/mL. An aqueous formulation of the antigen binding protein may be prepared in a pH-buffered solution, for example, at pH ranging from about 4.5 to about 6.5, or from about 4.8 to about 5.5, or alternatively about 5.0. Examples of buffers that are suitable for a pH within this range include acetate (e.g. sodium acetate), succinate (such as sodium succinate), gluconate, histidine, citrate and other organic acid buffers. The buffer concentration can be from about 1 mM to about 200 mM, or from about 10 mM to about 60 mM, depending, for example, on the buffer and the desired isotonicity of the formulation.

[0229] A tonicity agent, which may also stabilize the antigen binding protein, may be included in the formulation. Exemplary tonicity agents include polyols, such as mannitol, sucrose or trehalose. In one embodiment the aqueous formulation is isotonic, although hypertonic or hypotonic solutions may be suitable. Exemplary concentrations of the polyol in the formulation may range from about 1% to about 15% w/v.

[0230] A surfactant may also be added to the antigen binding protein formulation to reduce aggregation of the formulated antigen binding protein and/or minimize the formation of particulates in the formulation and/or reduce adsorption. Exemplary surfactants include nonionic surfactants such as polysorbates (e.g. polysorbate 20 or polysorbate 80) or poloxamers (e.g. poloxamer 188). Exemplary concentrations of surfactant may range from about 0.001% to about 0.5%, or from about 0.005% to about 0.2%, or alternatively from about 0.004% to about 0.01% w/v.

[0231] In one embodiment, the formulation contains the above-identified agents (i.e. antigen binding protein, buffer, polyol and surfactant) and is essentially free of one or more preservatives, such as benzyl alcohol, phenol, m-cresol, chlorobutanol and benzethonium chloride. In another embodiment, a preservative may be included in the formulation, e.g., at concentrations ranging from about 0.1% to about 2%, or alternatively from about 0.5% to about 1%. One or more other pharmaceutically acceptable carriers, excipients or stabilizers such as those described in Remington's Pharmaceutical Sciences 16th edition, Osol, A. Ed. (1980) may be included in the formulation provided that they do not adversely affect the desired characteristics of the formulation.

[0232] Therapeutic formulations of the bispecific antigen binding protein are prepared for storage by mixing the bispecific antigen binding protein having the desired degree of purity with optional physiologically acceptable carriers, excipients or stabilizers (Remington's Pharmaceutical Sciences 16th edition, Osol, A. Ed. (1980)), in the form of lyophilized formulations or aqueous solutions. Acceptable carriers, excipients, or stabilizers are nontoxic to recipients at the dosages and concentrations employed, and include buffers such as phosphate, citrate, and other organic acids; antioxidants including ascorbic acid and methionine; preservatives (such as octadecyldimethylbenzyl ammonium chloride; hexamethonium chloride; benzalkonium chloride, benzethonium chloride; phenol, butyl or benzyl alcohol; alkyl parabens such as methyl or propyl paraben; catechol; resorcinol; cyclohexanol; 3-pentanol; and m-cresol); low molecular weight (less than about 10 residues) polypeptides; proteins, such as serum albumin, gelatin, or immunoglobulins; hydrophilic polymers such as polyvinylpyrrolidone; amino acids such as glycine, glutamine, asparagine, histidine, arginine, or lysine; monosaccharides, disaccharides, and other carbohydrates including glucose, mannose, maltose, or dextrins; chelating agents such as EDTA; sugars such as sucrose, mannitol, trehalose or sorbitol; salt-forming counter-ions such as sodium; metal complexes (e.g., Zn-protein complexes); and/or non-ionic surfactants such as TWEEN™, PLURONICS™ or polyethylene glycol (PEG).

[0233] In one embodiment, a suitable formulation of the claimed invention contains an isotonic buffer such as a phosphate, acetate, or TRIS buffer in combination with a tonicity agent, such as a polyol, sorbitol, sucrose or sodium chloride, which tonicifies and stabilizes. One example of such a tonicity agent is 5% sorbitol or sucrose. In addition, the formulation could optionally include a surfactant at 0.01% to 0.02% wt/vol, for example, to prevent aggregation or improve stability. The pH of the formulation may range from 4.5-6.5 or 4.5 to 5.5. Other exemplary descriptions of pharmaceutical formulations for antigen binding proteins may be found in US 2003/0113316 and U.S. Pat. No. 6,171,586, each incorporated herein by reference in its entirety.

[0234] The formulation herein may also contain more than one active compound as necessary for the particular indication being treated, preferably those with complementary activities that do not adversely affect each other. For example, it may be desirable to further provide an immunosuppressive agent. Such molecules are suitably present in combination in amounts that are effective for the purpose intended.

[0235] The active ingredients may also be entrapped in microcapsule prepared, for example, by coacervation techniques or by interfacial polymerization, for example, hydroxymethylcellulose or gelatin-microcapsule and poly-(methylmethacylate) microcapsule, respectively, in colloidal drug delivery systems (for example, liposomes, albumin microspheres, microemulsions, nano-particles and nanocapsules) or in macroemulsions. Such techniques are disclosed in Remington's Pharmaceutical Sciences 16th edition, Osol, A. Ed. (1980).

[0236] Suspensions and crystal forms of antigen binding proteins are also contemplated. Methods to make suspensions and crystal forms are known to one of skill in the art.

[0237] The formulations to be used for in vivo administration must be sterile. The compositions of the invention may be sterilized by conventional, well known sterilization techniques. For example, sterilization is readily accomplished by filtration through sterile filtration membranes. The resulting solutions may be packaged for use or filtered under aseptic conditions and lyophilized, the lyophilized preparation being combined with a sterile solution prior to administration.

[0238] The process of freeze-drying is often employed to stabilize polypeptides for long-term storage, particularly when the polypeptide is relatively unstable in liquid compositions. A lyophilization cycle is usually composed of three steps: freezing, primary drying, and secondary drying (see Williams and Polli, Journal of Parenteral Science and Technology, Volume 38, Number 2, pages 48-59, 1984). In the freezing step, the solution is cooled until it is adequately frozen. Bulk water in the solution forms ice at this stage. The ice sublimes in the primary drying stage, which is conducted by reducing chamber pressure below the vapor pressure of the ice, using a vacuum. Finally, sorbed or bound water is removed at the secondary drying stage under reduced chamber pressure and an elevated shelf temperature. The process produces a material known as a lyophilized cake. Thereafter the cake can be reconstituted prior to use.

[0239] The standard reconstitution practice for lyophilized material is to add back a volume of pure water (typically equivalent to the volume removed during lyophilization), although dilute solutions of antibacterial agents are sometimes used in the production of pharmaceuticals for parenteral administration (see Chen, Drug Development and Industrial Pharmacy, Volume 18:1311-1354, 1992).

[0240] Excipients have been noted in some cases to act as stabilizers for freeze-dried products (see Carpenter et al., Volume 74:225-239, 1991). For example, known excipients include polyols (including mannitol, sorbitol and glycerol); sugars (including glucose and sucrose); and amino acids (including alanine, glycine and glutamic acid).

[0241] In addition, polyols and sugars are also often used to protect polypeptides from freezing and drying-induced damage and to enhance the stability during storage in the dried state. In general, sugars, in particular disaccharides, are effective in both the freeze-drying process and during storage. Other classes of molecules, including mono-and di-saccharides and polymers such as PVP, have also been reported as stabilizers of lyophilized products.

[0242] For injection, the pharmaceutical formulation and/or medicament may be a powder suitable for reconstitution with an appropriate solution as described above. Examples of these include, but are not limited to, freeze dried, rotary dried or spray dried powders, amorphous powders, granules, precipitates, or particulates. For injection, the formulations may optionally contain stabilizers, pH modifiers, surfactants, bioavailability modifiers and combinations of these.

[0243] Sustained-release preparations may be prepared. Suitable examples of sustained-release preparations include semipermeable matrices of solid hydrophobic polymers containing the bispecific antigen binding protein, which matrices are in the form of shaped articles, e.g., films, or microcapsule. Examples of sustained-release matrices include polyesters, hydrogels (for example, poly(2-hydroxyethyl-methacrylate), or poly(vinylalcohol)), polylactides (U.S. Pat. No. 3,773,919), copolymers of L-glutamic acid and y ethyl-L-glutamate, non-degradable ethylene-vinyl acetate, degradable lactic acid-glycolic acid copolymers such as the Lupron Depot™ (injectable microspheres composed of lactic acid-glycolic acid copolymer and leuprolide acetate), and poly-D-(−)-3-hydroxybutyric acid. While polymers such as ethylene-vinyl acetate and lactic acid-glycolic acid enable release of molecules for over 100 days, certain hydrogels release proteins for shorter time periods. When encapsulated polypeptides remain in the body for a long time, they may denature or aggregate as a result of exposure to moisture at 37° C., resulting in a loss of biological activity and possible changes in immunogenicity. Rational strategies can be devised for stabilization depending on the mechanism involved. For example, if the aggregation mechanism is discovered to be intermolecular S—S bond formation through thio-disulfide interchange, stabilization may be achieved by modifying sulfhydryl residues, lyophilizing from acidic solutions, controlling moisture content, using appropriate additives, and developing specific polymer matrix compositions.

[0244] The formulations of the invention may be designed to be short-acting, fast-releasing, long-acting, or sustained-releasing as described herein. Thus, the pharmaceutical formulations may also be formulated for controlled release or for slow release.

[0245] Specific dosages may be adjusted depending on conditions of disease, the age, body weight, general health conditions, sex, and diet of the subject, dose intervals, administration routes, excretion rate, and combinations of drugs. Any of the above dosage forms containing effective amounts are well within the bounds of routine experimentation and therefore, well within the scope of the instant invention.

[0246] The bispecific antigen binding protein is administered by any suitable means, including parenteral, subcutaneous, intraperitoneal, intrapulmonary, and intranasal, and, if desired for local treatment, intralesional administration. Parenteral infusions include intravenous, intraarterial, intraperitoneal, intramuscular, intradermal or subcutaneous administration. In addition, the bispecific antigen binding protein is suitably administered by pulse infusion, particularly with declining doses of the antigen binding protein. In one embodiment the dosing is given by injections, intravenous or subcutaneous injections, depending in part on whether the administration is brief or chronic. Other administration methods are contemplated, including topical, particularly transdermal, transmucosal, rectal, oral or local administration e.g. through a catheter placed close to the desired site. In one embodiment, the antigen binding protein of the invention is administered intravenously in a physiological solution at a dose ranging between 0.01 mg/kg to 100 mg/kg at a frequency ranging from daily to weekly to monthly (e.g. every day, every other day, every third day, or 2, 3, 4, 5, or 6 times per week), a dose ranging from 0.1 to 45 mg/kg, 0.1 to 15 mg/kg or 0.1 to 10 mg/kg at a frequency of once per week, once every two weeks, or once a month.

[0247] As used herein, the term “treating” or “treatment” is an intervention performed with the intention of preventing the development or altering the pathology of a disorder. Accordingly, “treatment” refers to both therapeutic treatment and prophylactic or preventative measures. Those in need of treatment include those already diagnosed with or suffering from the disorder or condition as well as those in which the disorder or condition is to be prevented. “Treatment” includes any indicia of success in the amelioration of an injury, pathology or condition, including any objective or subjective parameter such as abatement, remission, diminishing of symptoms, or making the injury, pathology or condition more tolerable to the patient, slowing in the rate of degeneration or decline, making the final point of degeneration less debilitating, or improving a patient's physical or mental well-being. The treatment or amelioration of symptoms can be based on objective or subjective parameters, including the results of a physical examination, self-reporting by a patient, neuropsychiatric exams, and/or a psychiatric evaluation.

[0248] The bispecific antigen binding proteins of the invention are useful for detecting target antigen(s) in biological samples and identification of cells or tissues that express the target antigen(s).

[0249] The bispecific antigen binding proteins described herein can be used for diagnostic purposes to detect, diagnose, or monitor diseases and/or conditions associated with the target antigen(s). Also provided are methods for the detection of the presence of the target antigen(s) in a sample using classical immunohistological methods known to those of skill in the art (e.g., Tijssen, 1993, Practice and Theory of Enzyme Immunoassays, Vol 15 (Eds R. H. Burdon and P. H. van Knippenberg, Elsevier, Amsterdam); Zola, 1987, Monoclonal Antibodies: A Manual of Techniques, pp. 147-158 (CRC Press, Inc.); Jalkanen et al., 1985, J. Cell. Biol. 101:976-985; Jalkanen et al., 1987, J. Cell Biol. 105:3087-3096). The detection of either target can be performed in vivo or in vitro.

[0250] Diagnostic applications provided herein include use of the antigen binding proteins to detect expression of target antigen(s). Examples of methods useful in the detection of the presence of the receptor include immunoassays, such as the enzyme linked immunosorbent assay (ELISA) and the radioimmunoassay (RIA).

[0251] For diagnostic applications, the antigen binding protein typically will be labeled with a detectable labeling group. Suitable labeling groups include, but are not limited to, the following: radioisotopes or radionuclides (e.g., ³H, ¹⁴C, ¹⁵N, ³⁵S, ⁹⁰Y, ⁹⁹Tc, ¹¹¹In, ¹²⁵I , ¹³¹I), fluorescent groups (e.g., FITC, rhodamine, lanthanide phosphors), enzymatic groups (e.g., horseradish peroxidase, β-galactosidase, luciferase, alkaline phosphatase), chemiluminescent groups, biotinyl groups, or predetermined polypeptide epitopes recognized by a secondary reporter (e.g., leucine zipper pair sequences, binding sites for secondary antibodies, metal binding domains, epitope tags). In some embodiments, the labeling group is coupled to the antigen binding protein via spacer arms of various lengths to reduce potential steric hindrance. Various methods for labeling proteins are known in the art and may be used.

[0252] In another embodiment, the bispecific antigen binding protein described herein can be used to identify a cell or cells that express target antigen(s). In a specific embodiment, the antigen binding protein is labeled with a labeling group and the binding of the labeled antigen binding protein to target antigen(s) is detected. In a further specific embodiment, the binding of the antigen binding protein to target antigen(s) is detected in vivo. In a further specific embodiment, the bispecific antigen binding protein is isolated and measured using techniques known in the art. See, for example, Harlow and Lane, 1988, Antibodies: A Laboratory Manual, New York: Cold Spring Harbor (ed. 1991 and periodic supplements); John E. Coligan, ed., 1993, Current Protocols In Immunology New York: John Wiley & Sons.

### EXAMPLES

[0253] Bispecific antigen binding proteins were prepared with a subset of the anti-TNFα and anti-TL1A antibodies. In some embodiments of this IgG-Fab format, a polypeptide comprising a VH-CH1 domain from a second antibody is fused through a peptide linker to the carboxyl-terminus of the heavy chain of a first antibody to form a modified heavy chain. A polypeptide comprising the remaining domains of the Fab fragment from the first antibody (i.e. a VL-CL domain) is co-expressed with the light chain of the first antibody and the modified heavy chain to produce the complete molecule. Assembly of the full molecule creates a tetravalent binding protein having two antigen binding domains against a first antigen located on the amino terminal side of a dimerized immunoglobulin Fc region and two antigen binding domains against a second antigen located on the carboxyl terminal side of the dimerized Fc region.

[0254] The TNFα/TL1A IgG-Fab consists of two antigen binding domains, one directed against TNFα and the other against TL1A. The DNA molecules encoding TNFα/TL1A IgG-Fab molecules contain fragments encoding an anti-TNFα (or anti-TL1A) antibody light chain, an anti-TNFα (or anti-TL1A) antibody heavy chain in which the C-terminus is fused to (i) an anti-TL1A (or anti-TNFα) antibody light chain or (ii) an anti-TL1A (or anti-TNFα) Fd (VH-CH1), and a third polypeptide comprising the other half of the Fab fragment to complete the carboxy-terminal binding domain (e.g. (i) an anti-TL1A (or anti-TNFα) Fd or (ii) an anti-TL1A (or anti-TNFα) antibody light chain. The IgG-Fab bispecific molecules contain charge pair mutations introduced into CH1 and CL domains of each Fab region (Fab 1 and Fab 2 as illustrated in FIG. 3). The charge pairs are designed to allow preferential assembly of anti-TNFAR light chain/VHCH1(Fd) pair and anti-TL1A light chain/VHCH1 (Fd) pair. As an additional approach to promote correct pairing of the light chain/VHCH1 (Fd) pair, for a subset of the IgG-Fab molecules generated, the CL and CH1 regions in the carboxyl-terminal Fab (i.e. Fab 2) were swapped such that the polypeptide fused to the carboxyl-terminal region of the heavy chain of the second antibody comprised VL and CH1 regions from the first antibody and the second polypeptide comprised VH and CL regions from the first antibody. See molecules listed in Tables 4 and 6. The DNA molecules were generated by synthesized gBlocks and cloned into the pTT5.1 vector. These expression vectors were used to transfect and express the TNFα/TL1A bispecific molecules in human 293-6E cells. 144 different IgG-Fab bispecific molecules were generated. The full sequences for each molecule are set forth in Table 4.

[0255] The IgG-Fab molecules were purified using affinity captured by MabSelect SuRe chromatography (GE Life Sciences, Piscataway, NJ) using a Large Format Autosampler (LFAS, Amgen, Inc., Thousand Oaks, CA). Clarified, conditioned media was loaded onto a 1 mL HiTrap MabSelect SuRe column (GE Life Sciences, Piscataway, NJ) equilibrated with Dulbecco's phosphate buffered saline without divalent cations (D-PBS, Life Technologies, Grand Island, NY). MabSelect columns were washed with 8 column volumes of D-PBS and eluted with 100 mM acetic acid, pH 3.6. When protein A eluates had an absorbance above 5 mAU at 280 nm, the eluent was directly loaded onto a HiTrap Desalting column (GE Life Sciences, Piscataway, NJ) and developed with 1.2 column volumes of 10 mM sodium acetate, 150 mM NaCl, pH 5.0. When desalting eluates had an absorbance above 3 mAU at 280 nm, sample collection was triggered and fractions were collected in 96-well deepwell blocks to a maximum of 2 mL each. Sample purity was determined by Caliper LabChip analysis under reducing (with 2% 2-mercaptoethanol) and non-reducing (with 25 mM iodoacetamide) conditions. Analytical SEC was carried out using a Zenix-C SEC-300 column (Sepax Technologies, Newark, DE) with an isocratic elution in 50 mM sodium phosphate, 250 mM NaCl, pH 6.9 over 8′.

[0256] The IgG-Fab molecules were tested for their expressability (titer and recovery) and activity. The results are shown in FIGS. 17-23 and in Table 6.

[0257] TL1A activity assay was performed using TF-1 NF-κB reporter cell line. In brief, 30 ng/ml (EC90) of human or cynomolgus monkey TL1A was incubated with 10⁴ TF-1 NF-κB reporter cells in the presence of serially diluted anti-TL1A antibodies or TL1A/TNF-α bispecific molecules in 96-well plate at 37° C. overnight. Each well was supplemented with 50 μl of Steady-glo Luciferase testing solution (Promega). Plate was covered and incubated while shaking for 10 minutes. Luciferase activity was analyzed by microbeta reader.

[0258] TNFα activity assay was performed using TF-1 NF-κB reporter cell line. In brief, 1 ng/ml (EC90) of human or cynomolgus monkey TNF-α was incubated with 10⁴ TF-1 NF-κB reporter cells in the presence of a serially diluted anti-TNF-α antibodies or TL1A/TNFα bispecific molecules in 96-well plate at 37° C. overnight. 50 μl of Steady-glo Luciferase testing solution (Promega) was added to each well. Plate was covered and incubated while shaking for 10 minutes. Luciferase activity was analyzed by microbeta reader.

Lengthy table referenced here
US20250333544A1-20251030-T00001
Please refer to the end of the specification for access instructions.

Lengthy table referenced here
US20250333544A1-20251030-T00002
Please refer to the end of the specification for access instructions.

Lengthy table referenced here
US20250333544A1-20251030-T00003
Please refer to the end of the specification for access instructions.

Lengthy table referenced here
US20250333544A1-20251030-T00004
Please refer to the end of the specification for access instructions.

Lengthy table referenced here
US20250333544A1-20251030-T00005
Please refer to the end of the specification for access instructions.

[0259] All publications, patents, and patent applications discussed and cited herein are hereby incorporated by reference in their entireties. It is understood that the disclosed invention is not limited to the particular methodology, protocols and materials described as these can vary. It is also understood that the terminology used herein is for the purposes of describing particular embodiments only and is not intended to limit the scope of the appended claims.

[0260] Those skilled in the art will recognize, or be able to ascertain using no more than routine experimentation, many equivalents to the specific embodiments of the invention described herein. Such equivalents are intended to be encompassed by the following claims.

LENGTHY TABLES
The patent application contains a lengthy table section. A copy of the table is available in electronic form from the USPTO web site (https://seqdata.uspto.gov/docdetail?docId=US20250333544A1). An electronic copy of the table will also be available from the USPTO upon request and payment of the fee set forth in 37 CFR 1.19(b)(3).

1-7. (canceled)

8. A bispecific, tetravalent antigen binding protein, comprising:
a) a first polypeptide comprising a first heavy chain of a first antibody comprising a first heavy chain variable region (VH1) and a first CH1 domain, wherein the first antibody specifically binds to a first antigen, and wherein the first heavy chain is fused through its C-terminus to the N-terminus of a polypeptide comprising a second heavy chain variable region of a second antibody (VH2), wherein the VH2 is fused through its C-terminus to the N-terminus of a second CH1 domain, and wherein the second antibody specifically binds to a second antigen; wherein
i) the VH1 or first CH1 domain comprises at least one amino acid substitution to introduce a negatively charged amino acid at a residue selected from the group consisting of positions 39, 44, and 183 using EU numbering; and
ii) the VH2 or second CH1 domain comprises at least one amino acid substitution to introduce a positively charged amino acid at a residue selected from the group consisting of a residue that corresponds to positions 39, 44, and 183 using EU numbering; and
b) a second polypeptide comprising a first light chain of the first antibody of a), wherein the first light chain comprises a first light chain variable region (VL1) and a first CL region; and wherein the VL1 or first CL domain comprises at least one amino acid substitution to introduce a positively charged amino acid at a residue selected from the group consisting of positions 38, 100, and 176 using EU numbering; and
c) a third polypeptide comprising a second light chain of the second antibody of a), wherein the second light chain comprises a second light chain variable region (VL2) and a second CL region;. and wherein the VL1 or first CL domain comprises at least one amino acid substitution to introduce a negatively charged amino acid at a residue selected from the group consisting of positions 38, 100, and 176 using EU numbering.

9. The antigen binding protein according to claim 8, wherein the first heavy chain is fused to the VH2 via a peptide linker.

10. The antigen binding protein according to claim 9, wherein the peptide linker comprises a sequence selected from the group consisting of (Gly₃Ser)₂, (Gly₄Ser)₂, (Gly₃Ser)₃, (Gly₄Ser)₃, (Gly₃Ser)₄, (Gly₄Ser)₄, (Gly₃Ser)₅, (Gly₄Ser)₅, (Gly₃Ser)₆, and (Gly₄Ser)₆.

11. The antigen binding protein according to claim 8, wherein
a) the VH1 or first CH1 domain comprises a mutation selected from the group consisting of Q39E, G44E, and S183E using EU numbering;
b) the VH2 or second CH1 domain comprises a mutation selected from the group consisting of Q39K, G44K, and S183K using EU numbering;
c) the VL1 or first CL domain comprises a mutation selected from the group consisting of Q38K, G100K, and S176K using EU numbering; and
d) the VL2 or second CL domain comprises a mutation selected from the group consisting of Q38E, G100E, and S176E using EU numbering.

12. The antigen binding protein according to claim 11, wherein a) the first CH1 domain comprises a S183E mutation using EU numbering;
b) the second CH1 domain comprises a S183K mutation using EU numbering;
c) the first CL domain comprises a S176K mutation using EU numbering; and
d) the second CL domain comprises a S176E mutation using EU numbering.

13. The antigen binding protein according to claim 11, wherein
a) the VH1 comprises a Q39E mutation and the first CH1 domain comprises a S183E mutation using EU numbering;
b) the VH2 comprises a Q39K mutation and the second CH1 domain comprises a S183K mutation using EU numbering;
c) the VL1 comprises a Q38K mutation and the first CL domain comprises a S176K mutation using EU numbering; and
d) the VL2 comprises a Q38E mutation and the second CL domain comprises a S176E mutation using EU numbering.

14. The antigen binding protein according to claim 11, wherein
a) the first CH1 domain comprises G44E and S183E mutations using EU numbering;
b) the second CH1 domain comprises G44K and S183K mutations using EU numbering;
c) the first CL domain comprises G100K and S176K mutations using EU numbering; and
d) the second CL domain comprises G100E and S176E mutations using EU numbering.

15-21. (canceled)

22. A method for preparing a bispecific, tetravalent antigen binding protein, comprising:
1) co-expressing in a host cell:
a) a first polynucleotide wherein the first polynucleotide encodes a first polypeptide comprising a first heavy chain of a first antibody comprising a first heavy chain variable region (VH1) and a first CH1 domain, wherein the first antibody specifically binds to a first antigen, and wherein the first heavy chain is fused through its C-terminus to the N-terminus of a polypeptide comprising a second heavy chain variable region of a second antibody (VH2), wherein the VH2 is fused through its C-terminus to the N-terminus of a second CH1 domain, and wherein the second antibody specifically binds to a second antigen; wherein
i) the VH1 or first CH1 domain comprises at least one amino acid substitution to introduce a positively charged amino acid at a residue selected from the group consisting of positions 39, 44, and 183 using EU numbering; and
ii) the VH2 or second CH1 domain comprises at least one amino acid substitution to introduce a negatively charged amino acid at a residue selected from the group consisting of a residue that corresponds to positions 39, 44, and 183 using EU numbering; and
b) a second polynucleotide wherein the second polynucleotide encodes a second polypeptide comprising a light chain of the first antibody of a), wherein the light chain comprises a first light chain variable region (VL1) and a first CL region; and wherein the VL1 or first CL domain comprises at least one amino acid substitution to introduce a negatively charged amino acid at a residue selected from the group consisting of positions 38, 100, and 176 using EU numbering;
c) a third polynucleotide wherein the third polycucleotide encodes a third polypeptide comprising a light chain of the second antibody of a), wherein the light chain comprises a second light chain variable region (VL2) and a second CL region;. and wherein the VL1 or first CL domain comprises at least one amino acid substitution to introduce a positively charged amino acid at a residue selected from the group consisting of positions 38, 100, and 176 using EU numbering;
2) cultivating the host cell under conditions such that the polypeptides are produced; and
3) recovering from the host cell the antigen binding protein.

23. The method according to claim 22, wherein the first polynucleotide comprises nucleic acid sequence encoding for a peptide linker inserted between the nucleic acid sequences encoding for the first heavy chain and the VH2.

24. The method according to claim 23, wherein the peptide linker comprises a sequence selected from the group consisting of (Gly₃Ser)₂, (Gly₄Ser)₂, (Gly₃Ser)₃, (Gly₄Ser)₃, (Gly₃Ser)₄, (Gly₄Ser)₄, (Gly₃Ser)₅, (Gly₄Ser)₅, (Gly₃Ser)₆, and (Gly₄Ser)₆.

25. The method according to claim 22, wherein
a) the VH1 or first CH1 domain comprises a mutation selected from the group consisting of Q39K, G44K, and S183K using EU numbering;
b) the VH2 or second CH1 domain comprises a mutation selected from the group consisting of Q39E, G44E, and S183E using EU numbering;
c) the VL1 or first CL domain comprises a mutation selected from the group consisting of Q38E, G100E, and S176E using EU numbering; and
d) the VL2 or second CL domain comprises a mutation selected from the group consisting of Q38K, G100K, and S176K using EU numbering.

26. The method according to claim 22, wherein
a) the first CH1 domain comprises a S183K mutation using EU numbering;
b) the second CH1 domain comprises a S183E mutation using EU numbering;
c) the first CL domain comprises a S176E mutation using EU numbering; and
d) the second CL domain comprises a S176K mutation using EU numbering.

27. The method according to claim 22, wherein
a) the VH1 comprises a Q39K mutation and the first CH1 domain comprises a S183K mutation using EU numbering;
b) the VH2 comprises a Q39E mutation and the second CH1 domain comprises a S183E mutation using EU numbering;
c) the VL1 comprises a Q38E mutation and the first CL domain comprises a S176E mutation using EU numbering; and
d) the VL2 comprises a Q38K mutation and the second CL domain comprises a S176K mutation using EU numbering.

28. The method according to claim 22, wherein
a) the first CH1 domain comprises G44K and S183K mutations using EU numbering;
b) the second CH1 domain comprises G44E and S183E mutations using EU numbering;
c) the first CL domain comprises G100E and S176E mutations using EU numbering; and
d) the second CL domain comprises G100K and S176K mutations using EU numbering.

29. A method for preparing a bispecific, tetravalent antigen binding protein, comprising:
1) co-expressing in a host cell:
a) a first polynucleotide wherein the first polynucleotide encodes a first polypeptide comprising a first heavy chain of a first antibody comprising a first heavy chain variable region (VH1) and a first CH1 domain, wherein the first antibody specifically binds to a first antigen, and wherein the first heavy chain is fused through its C-terminus to the N-terminus of a polypeptide comprising a second heavy chain variable region of a second antibody (VH2), wherein the VH2 is fused through its C-terminus to the N-terminus of a second CH1 domain, and wherein the second antibody specifically binds to a second antigen; wherein
i) the VH1 or first CH1 domain comprises at least one amino acid substitution to introduce a negatively charged amino acid at a residue selected from the group consisting of positions 39, 44, and 183 using EU numbering; and
ii) the VH2 or second CH1 domain comprises at least one amino acid substitution to introduce a positively charged amino acid at a residue selected from the group consisting of a residue that corresponds to positions 39, 44, and 183 using EU numbering; and
b) a second polynucleotide wherein the second polynucleotide encodes a second polypeptide comprising a first light chain of the first antibody of a), wherein the first light chain comprises a first light chain variable region (VL1) and a first CL region; and wherein the VL1 or first CL domain comprises at least one amino acid substitution to introduce a positively charged amino acid at a residue selected from the group consisting of positions 38, 100, and 176 using EU numbering; and
c) a third polynucleotide wherein the third polynucleotide encodes a third polypeptide comprising a second light chain of the second antibody of a), wherein the second light chain comprises a second light chain variable region (VL2) and a second CL region;. and wherein the VL1 or first CL domain comprises at least one amino acid substitution to introduce a negatively charged amino acid at a residue selected from the group consisting of positions 38, 100, and 176 using EU numbering;
2) cultivating the host cell under conditions such that the polypeptides are produced; and
3) recovering from the host cell the antigen binding protein.

30. The method according to claim 29, wherein the first heavy chain is fused to the VH2 via a peptide linker.

31. The method according to claim 30, wherein the peptide linker comprises a sequence selected from the group consisting of (Gly₃Ser)₂, (Gly₄Ser)₂, (Gly₃Ser)₃, (Gly₄Ser)₃, (Gly₃Ser)₄, (Gly₄Ser)₄, (Gly₃Ser)₅, (Gly₄Ser)₅, (Gly₃Ser)₆, and (Gly₄Ser)₆.

32. The method according to claim 29, wherein
a) the VH1 or first CH1 domain comprises a mutation selected from the group consisting of Q39E, G44E, and S183E using EU numbering;
b) the VH2 or second CH1 domain comprises a mutation selected from the group consisting of Q39K, G44K, and S183K using EU numbering;
c) the VL1 or first CL domain comprises a mutation selected from the group consisting of Q38K, G100K, and S176K using EU numbering; and
d) the VL2 or second CL domain comprises a mutation selected from the group consisting of Q38E, G100E, and S176E using EU numbering.

33. The method according to claim 32, wherein
a) the first CH1 domain comprises a S183E mutation using EU numbering;
b) the second CH1 domain comprises a S183K mutation using EU numbering;
c) the first CL domain comprises a S176K mutation using EU numbering; and
d) the second CL domain comprises a S176E mutation using EU numbering.

34. The method according to claim 32, wherein
a) the VH1 comprises a Q39E mutation and the first CH1 domain comprises a S183E mutation using EU numbering;
b) the VH2 comprises a Q39K mutation and the second CH1 domain comprises a S183K mutation using EU numbering;
c) the VL1 comprises a Q38K mutation and the first CL domain comprises a S176K mutation using EU numbering; and
d) the VL2 comprises a Q38E mutation and the second CL domain comprises a S176E mutation using EU numbering.

35. The method according to claim 32, wherein
a) the first CH1 domain comprises G44E and S183E mutations using EU numbering;
b) the second CH1 domain comprises G44K and S183K mutations using EU numbering;
c) the first CL domain comprises G100K and S176K mutations using EU numbering; and
d) the second CL domain comprises G100E and S176E mutations using EU numbering.

36. A method for preparing a bispecific, tetravalent antigen binding protein, comprising:
1) co-expressing in a host cell:
a) a first polynucleotide wherein the first polynucleotide encodes a first polypeptide comprising a first heavy chain of a first antibody comprising a first heavy chain variable region (VH1) and a first CH1 domain, wherein the first antibody specifically binds to a first antigen, and wherein the first heavy chain is fused through its C-terminus to the N-terminus of a polypeptide comprising a second heavy chain variable region of a second antibody (VH2), wherein the VH2 is fused through its C-terminus to the N-terminus of a second CH1 domain, and wherein the second antibody specifically binds to a second antigen; wherein
i) the VH1 or first CH1 domain comprises at least one amino acid substitution to introduce a charged amino acid at a residue selected from the group consisting of positions 39, 44, and 183 using EU numbering; and
ii) the VH2 or second CH1 domain comprises at least one amino acid substitution to introduce a charged amino acid at a residue selected from the group consisting of a residue that corresponds to positions 39, 44, and 183 using EU numbering, wherein the charge is the opposite of the substituted residue of the VH1 or first CH1 of the first heavy chain; and
b) a second polynucleotide wherein the second polynucleotide encodes a second polypeptide comprising a light chain of the first antibody of a), wherein the light chain comprises a first light chain variable region (VL1) and a first CL region; and wherein the VL1 or first CL domain comprises at least one amino acid substitution to introduce a charged amino acid at a residue selected from the group consisting of positions 38, 100, and 176 using EU numbering, wherein the charge at position 38 is the opposite of the substituted residue of the VH1 or first CH1 of the first heavy chain at position 39; the charge at position 100 is the opposite of the substituted residue of the VH1 or first CH1 of the first heavy chain at position 44;
the charge at position 176 is the opposite of the substituted residue of the VH1 or first CH1 of the first heavy chain at position 183; and
c) a third polynucleotide wherein the third polynucleotide encodes a third polypeptide comprising a light chain of the second antibody of a), wherein the light chain comprises a second light chain variable region (VL2) and a second CL region; and
wherein the VL1 or first CL domain comprises at least one amino acid substitution to introduce a positively charged amino acid at a residue selected from the group consisting of positions 38, 100, and 176 using EU numbering, wherein the charge at position 38 is the opposite of the substituted residue of the VH2 or second CH1 of the second heavy chain at position 39; the charge at position 100 is the opposite of the substituted residue of the VH2 or second CH1 of the second heavy chain at position 44; the charge at position 176 is the opposite of the substituted residue of the VH2 or second CH1 of the second heavy chain at position 183;
2) cultivating the host cell under conditions such that the polypeptides are produced; and
3) recovering from the host cell the antigen binding protein.

37. The method according to claim 36, wherein the first heavy chain is fused to the VH2 via a peptide linker.

38. The method according to claim 37, wherein the peptide linker comprises a sequence selected from the group consisting of (Gly₃Ser)₂, (Gly₄Ser)₂, (Gly₃Ser)₃, (Gly₄Ser)₃, (Gly₃Ser)₄, (Gly₄Ser)₄, (Gly₃Ser)₅, (Gly₄Ser)₅, (Gly₃Ser)₆, and (Gly₄Ser)₆.

39. The method according to claim 36, wherein
a) the VH1 comprises a Q39E mutation and the first CH1 domain comprises a S183K mutation using EU numbering;
b) the VH2 comprises a Q39K mutation and the second CH1 domain comprises a S183E mutation using EU numbering;
c) the VL1 comprises a Q38K mutation and the first CL domain comprises a S176E mutation using EU numbering; and
d) the VL2 comprises a Q38E mutation and the second CL domain comprises a S176K mutation using EU numbering.

40. The method according to claim 39, wherein
a) the first CH1 domain comprises G44E and S183K mutations using EU numbering;
b) the second CH1 domain comprises G44K and S183E mutations using EU numbering;
c) the first CL domain comprises G100K and S176E mutations using EU numbering; and
d) the second CL domain comprises G100E and S176K mutations using EU numbering.

41. The method according to claim 39, wherein
a) the VH1 comprises a Q39K mutation and the first CH1 domain comprises a S183E mutation using EU numbering;
b) the VH2 comprises a Q39E mutation and the second CH1 domain comprises a S183K mutation using EU numbering;
c) the VL1 comprises a Q38E mutation and the first CL domain comprises a S176K mutation using EU numbering; and
d) the VL2 comprises a Q38K mutation and the second CL domain comprises a S176E mutation using EU numbering.

42. The method according to claim 39, wherein
a) the first CH1 domain comprises G44K and S183E mutations using EU numbering;
b) the second CH1 domain comprises G44E and S183K mutations using EU numbering;
c) the first CL domain comprises G100E and S176K mutations using EU numbering; and
d) the second CL domain comprises G100K and S176E mutations using EU numbering.

The application's sequence listing, which the Patent Office published only in electronic form, follows.

SEQUENCE LISTING (953 sequences)

SEQ ID NO: 1 - DNA, 642 bp, synthetic construct
  misc_feature 1..642: note = source = /note="Description of Artificial Sequence: Synthetic polynucleotide"
  source 1..642: mol_type = other DNA
gatatccaaatgacacaatcaccatcgtcgctttcagcgtctgttggcgaccgtgtgacgattacctgtcgcgcgtcccagggaatccggaattacctcgcatggtatcagcaaaaacccggaaaagcaccgaagctcctgatctatgccgcctcgactcttcagagtggtgtgccgtcgaggtttagcgggtccgggtcaggtacggactttactctcacaatttccagcctgcagcccgaagatgtagctacctattactgccagagatacaaccgagcgccttacacattcggacaagggacaaaagtcgagatcaagcgtacggtggctgcaccatctgtcttcatcttcccgccatctgatgagcagttgaaatctggaactgcctctgttgtgtgcctgctgaataacttctatcccagagaggccaaagtacagtggaaggtggataacgccctccaatcgggtaactcccaggagagtgtcacagagcaggacagcaaggacagcacctacagcctcgaaagcaccctgacgctgagcaaagcagactacgagaaacacaaagtctacgcctgcgaagtcacccatcagggcctgagctcgcccgtcacaaagagcttcaacaggggagagtgt

SEQ ID NO: 2 - DNA, 642 bp, synthetic construct
  misc_feature 1..642: note = source = /note="Description of Artificial Sequence: Synthetic polynucleotide"
  source 1..642: mol_type = other DNA
gaaattgtgttgacgcagtctccaggcaccctgtctttgtctccaggggaaagagccaccctctcctgcagggccagtcagagtgttagaagcagttacttagcctggtaccagcagaaacctggccaggctcccaggctcctcatctatggtgcatccagcagggccactggcatcccagacaggttcagtggcagtgggtctgggacagacttcactctcaccatcagcagactggagcctgaagattttgcagtgtattactgtcagcagtatggtagctcacctaccttcggccaagggacacgactggagattaaacgaacggtggctgcaccatctgtcttcatcttcccgccatctgatgagcagttgaaatctggtaccgcctctgttgtgtgcctgctgaataacttctatcccagagaggccaaagtacagtggaaggtggataacgccctccaatcgggtaactcccaggagagtgtcacagagcaggacagcaaggacagcacctacagcctcaagagcaccctgacgctgagcaaagcagactacgagaaacacaaagtctacgcctgcgaagtcacccatcagggcctgagctcgcccgtcacaaagagcttcaacaggggagagtgt

SEQ ID NO: 3 - DNA, 2046 bp, synthetic construct
  misc_feature 1..2046: note = source = /note="Description of Artificial Sequence: Synthetic polynucleotide"
  source 1..2046: mol_type = other DNA
gaggtacaactggtggaatcaggtggaggtttggtgcagccggggagatcgctcaggcttagctgtgcggcatcggggtttactttcgatgattatgcgatgcattgggtccggcaagcgcctggaaaagggctcgagtgggtttccgccattacgtggaatagcggacacatcgattatgcagacagtgtggagggcagattcacaatctcacgagacaatgctaagaacagcctgtaccttcagatgaactcacttcgcgcggaagataccgccgtatactactgcgccaaagtctcctacttgtctacagcttcgtcgctcgactattggggtcaaggaacgttggtcaccgtctctagtgcctccaccaagggcccatcggtcttccccctggcaccctcctccaagagcacctctgggggcacagcggccctgggctgcctggtcaaggactacttccccgaaccggtgacggtgtcgtggaactcaggcgccctgaccagcggcgtgcacaccttcccggctgtcctacagtcctcaggactctactccctcaaaagcgtggtgaccgtgccctccagcagcttgggcacccagacctacatctgcaacgtgaatcacaagcccagcaacaccaaggtggacaagaaagttgagcccaaatcttgtgacaaaactcacacatgcccaccgtgcccagcacctgaactcctggggggaccgtcagtcttcctcttccccccaaaacccaaggacaccctcatgatctcccggacccctgaggtcacatgcgtggtggtggacgtgagccacgaagaccctgaggtcaagttcaactggtacgtggacggcgtggaggtgcataatgccaagacaaagccgtgtgaggagcagtacggcagcacgtaccgttgtgtcagcgtcctcaccgtcctgcaccaggactggctgaatggcaaggagtacaagtgcaaggtctccaacaaagccctcccagcccccatcgagaaaaccatctccaaagccaaagggcagccccgagaaccacaggtgtacaccctgcccccatcccgggaggagatgaccaagaaccaggtcagcctgacctgcctggtcaaaggcttctatcccagcgacatcgccgtggagtgggagagcaatgggcagccggagaacaactacaagaccacgcctcccgtgctggactccgacggctccttcttcctctatagcaagctcaccgtggacaagagcaggtggcagcaggggaacgtcttctcatgctccgtgatgcatgaggctctgcacaaccactacacgcagaagagcctctccctgtctccgggtggtggcggatcgggaggtggcggatcccaggtgcagttacagcagtcgggcgcaggactgttgaagccttcggagaccctgtccctcacctgcgctgtccatggtgggtccttcagtggttactactggaactggattcgccagccaccagggaaggggctagagtggattggggaaatcaatcatgctggaaacaccaactacaacccgtccctcaagagtcgagtcaccatatcattagacacgtccaagaaccagttctccctgacgctgacctctgtgaccgccgcggacacggctgtgtattactgtgcgagaggatattgtagaagtaccacctgctactttgactactggggccagggaaccctagtcaccgtctcctcagcctccaccaagggcccatcggtcttccccctggcaccctcctccaagagcacctctgggggcacagcggccctgggctgcctggtcaaggactacttccccgaaccggtgacggtgtcgtggaactcaggcgccctgaccagcggcgtgcacaccttcccggctgtcctacagtcctcaggactctactccctcgagagcgtggtgaccgtgccctccagcagcttgggcacccagacctacatctgcaacgtgaatcacaagcccagcaacaccaaggtggacaagaaagttgagcccaaatcttgt

SEQ ID NO: 4 - protein, 214 aa, synthetic construct
  REGION 1..214: note = source = /note="Description of Artificial Sequence: Synthetic polypeptide"
DIQMTQSPSSLSASVGDRVTITCRASQGIRNYLAWYQQKPGKAPKLLIYAASTLQSGVPSRFSGSGSGTDFTLTISSLQPEDVATYYCQRYNRAPYTFGQGTKVEIKRTVAAPSVFIFPPSDEQLKSGTASVVCLLNNFYPREAKVQWKVDNALQSGNSQESVTEQDSKDSTYSLESTLTLSKADYEKHKVYACEVTHQGLSSPVTKSFNRGEC

SEQ ID NO: 5 - protein, 214 aa, synthetic construct
  REGION 1..214: note = source = /note="Description of Artificial Sequence: Synthetic polypeptide"
EIVLTQSPGTLSLSPGERATLSCRASQSVRSSYLAWYQQKPGQAPRLLIYGASSRATGIPDRFSGSGSGTDFTLTISRLEPEDFAVYYCQQYGSSPTFGQGTRLEIKRTVAAPSVFIFPPSDEQLKSGTASVVCLLNNFYPREAKVQWKVDNALQSGNSQESVTEQDSKDSTYSLKSTLTLSKADYEKHKVYACEVTHQGLSSPVTKSFNRGEC

SEQ ID NO: 6 - protein, 682 aa, synthetic construct
  REGION 1..682: note = source = /note="Description of Artificial Sequence: Synthetic polypeptide"
EVQLVESGGGLVQPGRSLRLSCAASGFTFDDYAMHWVRQAPGKGLEWVSAITWNSGHIDYADSVEGRFTISRDNAKNSLYLQMNSLRAEDTAVYYCAKVSYLSTASSLDYWGQGTLVTVSSASTKGPSVFPLAPSSKSTSGGTAALGCLVKDYFPEPVTVSWNSGALTSGVHTFPAVLQSSGLYSLKSVVTVPSSSLGTQTYICNVNHKPSNTKVDKKVEPKSCDKTHTCPPCPAPELLGGPSVFLFPPKPKDTLMISRTPEVTCVVVDVSHEDPEVKFNWYVDGVEVHNAKTKPCEEQYGSTYRCVSVLTVLHQDWLNGKEYKCKVSNKALPAPIEKTISKAKGQPREPQVYTLPPSREEMTKNQVSLTCLVKGFYPSDIAVEWESNGQPENNYKTTPPVLDSDGSFFLYSKLTVDKSRWQQGNVFSCSVMHEALHNHYTQKSLSLSPGGGGSGGGGSQVQLQQSGAGLLKPSETLSLTCAVHGGSFSGYYWNWIRQPPGKGLEWIGEINHAGNTNYNPSLKSRVTISLDTSKNQFSLTLTSVTAADTAVYYCARGYCRSTTCYFDYWGQGTLVTVSSASTKGPSVFPLAPSSKSTSGGTAALGCLVKDYFPEPVTVSWNSGALTSGVHTFPAVLQSSGLYSLESVVTVPSSSLGTQTYICNVNHKPSNTKVDKKVEPKSC

SEQ ID NO: 7 - DNA, 642 bp, synthetic construct; identical to SEQ ID NO: 1
  misc_feature 1..642: note = source = /note="Description of Artificial Sequence: Synthetic polynucleotide"
  source 1..642: mol_type = other DNA

SEQ ID NO: 8 - DNA, 642 bp, synthetic construct
  misc_feature 1..642: note = source = /note="Description of Artificial Sequence: Synthetic polynucleotide"
  source 1..642: mol_type = other DNA
gacatccagatgacccagtctccatcctccctgtctgcatctgtaggagacagagtcaccatcacttgccgggcaagtcagagcattaacaactatttaaattggtatcagcagagaccagggaaagcccctaagctcctgatctatgctgcatccagtttgcaaagtggggtcccatcaaggttcagtggcagtggatctgggacagatttcactctcaccatcagcagtctgcaacctgaagattttgcaacttactactgtcaacagagttacagtacccctcggacgttcggccaagggaccaagctggaaatcaaacgaacggtggctgcaccatctgtcttcatcttcccgccatctgatgagcagttgaaatctggtaccgcctctgttgtgtgcctgctgaataacttctatcccagagaggccaaagtacagtggaaggtggataacgccctccaatcgggtaactcccaggagagtgtcacagagcaggacagcaaggacagcacctacagcctcaagagcaccctgacgctgagcaaagcagactacgagaaacacaaagtctacgcctgcgaagtcacccatcagggcctgagctcgcccgtcacaaagagcttcaacaggggagagtgt

SEQ ID NO: 9 - DNA, 2040 bp, synthetic construct
  misc_feature 1..2040: note = source = /note="Description of Artificial Sequence: Synthetic polynucleotide"
  source 1..2040: mol_type = other DNA
gaggtacaactggtggaatcaggtggaggtttggtgcagccggggagatcgctcaggcttagctgtgcggcatcggggtttactttcgatgattatgcgatgcattgggtccggcaagcgcctggaaaagggctcgagtgggtttccgccattacgtggaatagcggacacatcgattatgcagacagtgtggagggcagattcacaatctcacgagacaatgctaagaacagcctgtaccttcagatgaactcacttcgcgcggaagataccgccgtatactactgcgccaaagtctcctacttgtctacagcttcgtcgctcgactattggggtcaaggaacgttggtcaccgtctctagtgcctccaccaagggcccatcggtcttccccctggcaccctcctccaagagcacctctgggggcacagcggccctgggctgcctggtcaaggactacttccccgaaccggtgacggtgtcgtggaactcaggcgccctgaccagcggcgtgcacaccttcccggctgtcctacagtcctcaggactctactccctcaaaagcgtggtgaccgtgccctccagcagcttgggcacccagacctacatctgcaacgtgaatcacaagcccagcaacaccaaggtggacaagaaagttgagcccaaatcttgtgacaaaactcacacatgcccaccgtgcccagcacctgaactcctggggggaccgtcagtcttcctcttccccccaaaacccaaggacaccctcatgatctcccggacccctgaggtcacatgcgtggtggtggacgtgagccacgaagaccctgaggtcaagttcaactggtacgtggacggcgtggaggtgcataatgccaagacaaagccgtgtgaggagcagtacggcagcacgtaccgttgtgtcagcgtcctcaccgtcctgcaccaggactggctgaatggcaaggagtacaagtgcaaggtctccaacaaagccctcccagcccccatcgagaaaaccatctccaaagccaaagggcagccccgagaaccacaggtgtacaccctgcccccatcccgggaggagatgaccaagaaccaggtcagcctgacctgcctggtcaaaggcttctatcccagcgacatcgccgtggagtgggagagcaatgggcagccggagaacaactacaagaccacgcctcccgtgctggactccgacggctccttcttcctctatagcaagctcaccgtggacaagagcaggtggcagcaggggaacgtcttctcatgctccgtgatgcatgaggctctgcacaaccactacacgcagaagagcctctccctgtctccgggtggtggcggatcgggaggtggcggatcccaggtgcagctgcaggagtcgggcccaggactggtgaagccttcggagaccctgtccctcacctgcactgtctctggtggctccatcagtagttacttctggagctggattcggcagcccccaggtaagggactggagtggattggctatatctattacagtgggcagaccaaatacaacccctccctcaagagtcgagtcaccatatcaatagacacgtccaagaaccagttctccctgaagctgagctctgtgaccgctgcggacacggccgtgtattactgtgcgagagaaactgggagctactacggctttgactactggggccagggaaccctggtcaccgtctcctcagcctccaccaagggcccatcggtcttccccctggcaccctcctccaagagcacctctgggggcacagcggccctgggctgcctggtcaaggactacttccccgaaccggtgacggtgtcgtggaactcaggcgccctgaccagcggcgtgcacaccttcccggctgtcctacagtcctcaggactctactccctcgagagcgtggtgaccgtgccctccagcagcttgggcacccagacctacatctgcaacgtgaatcacaagcccagcaacaccaaggtggacaagaaagttgagcccaaatcttgt

SEQ ID NO: 10 - protein, 214 aa, synthetic construct; identical to SEQ ID NO: 4
  REGION 1..214: note = source = /note="Description of Artificial Sequence: Synthetic polypeptide"

SEQ ID NO: 11 - protein, 214 aa, synthetic construct
  REGION 1..214: note = source = /note="Description of Artificial Sequence: Synthetic polypeptide"
DIQMTQSPSSLSASVGDRVTITCRASQSINNYLNWYQQRPGKAPKLLIYAASSLQSGVPSRFSGSGSGTDFTLTISSLQPEDFATYYCQQSYSTPRTFGQGTKLEIKRTVAAPSVFIFPPSDEQLKSGTASVVCLLNNFYPREAKVQWKVDNALQSGNSQESVTEQDSKDSTYSLKSTLTLSKADYEKHKVYACEVTHQGLSSPVTKSFNRGEC

SEQ ID NO: 12 - protein, 680 aa, synthetic construct
  REGION 1..680: note = source = /note="Description of Artificial Sequence: Synthetic polypeptide"
EVQLVESGGGLVQPGRSLRLSCAASGFTFDDYAMHWVRQAPGKGLEWVSAITWNSGHIDYADSVEGRFTISRDNAKNSLYLQMNSLRAEDTAVYYCAKVSYLSTASSLDYWGQGTLVTVSSASTKGPSVFPLAPSSKSTSGGTAALGCLVKDYFPEPVTVSWNSGALTSGVHTFPAVLQSSGLYSLKSVVTVPSSSLGTQTYICNVNHKPSNTKVDKKVEPKSCDKTHTCPPCPAPELLGGPSVFLFPPKPKDTLMISRTPEVTCVVVDVSHEDPEVKFNWYVDGVEVHNAKTKPCEEQYGSTYRCVSVLTVLHQDWLNGKEYKCKVSNKALPAPIEKTISKAKGQPREPQVYTLPPSREEMTKNQVSLTCLVKGFYPSDIAVEWESNGQPENNYKTTPPVLDSDGSFFLYSKLTVDKSRWQQGNVFSCSVMHEALHNHYTQKSLSLSPGGGGSGGGGSQVQLQESGPGLVKPSETLSLTCTVSGGSISSYFWSWIRQPPGKGLEWIGYIYYSGQTKYNPSLKSRVTISIDTSKNQFSLKLSSVTAADTAVYYCARETGSYYGFDYWGQGTLVTVSSASTKGPSVFPLAPSSKSTSGGTAALGCLVKDYFPEPVTVSWNSGALTSGVHTFPAVLQSSGLYSLESVVTVPSSSLGTQTYICNVNHKPSNTKVDKKVEPKSC

SEQ ID NO: 13 - DNA, 642 bp, synthetic construct; identical to SEQ ID NO: 1
  misc_feature 1..642: note = source = /note="Description of Artificial Sequence: Synthetic polynucleotide"
  source 1..642: mol_type = other DNA

SEQ ID NO: 14 - DNA, 660 bp, synthetic construct
  misc_feature 1..660: note = source = /note="Description of Artificial Sequence: Synthetic polynucleotide"
  source 1..660: mol_type = other DNA
gacatccagatgacccagtctccaagctccctgtctgcgtctgtgggcgatagggtcaccatcacttgcaggtccagccagagtgtgttatacagctccaacaataagaactacttagtttggtaccagcagaaaccaggaaaggttcctaaactgctcatttactgggcatctacccgggaatccggggtccctagtcgattcagtggcagcgggtctgggacagatttcactctcaccatcagcagcctgcagcctgaagatgtggcaacttattactgtcagcaatattataagactcctctcactttcggcggagggaccaaggtggagatcaaacgaacggtggctgcaccatctgtcttcatcttcccgccatctgatgagcagttgaaatctggtaccgcctctgttgtgtgcctgctgaataacttctatcccagagaggccaaagtacagtggaaggtggataacgccctccaatcgggtaactcccaggagagtgtcacagagcaggacagcaaggacagcacctacagcctcaagagcaccctgacgctgagcaaagcagactacgagaaacacaaagtctacgcctgcgaagtcacccatcagggcctgagctcgcccgtcacaaagagcttcaacaggggagagtgt

SEQ ID NO: 15 - DNA, 2061 bp, synthetic construct
  misc_feature 1..2061: note = source = /note="Description of Artificial Sequence: Synthetic polynucleotide"
  source 1..2061: mol_type = other DNA
gaggtacaactggtggaatcaggtggaggtttggtgcagccggggagatcgctcaggcttagctgtgcggcatcggggtttactttcgatgattatgcgatgcattgggtccggcaagcgcctggaaaagggctcgagtgggtttccgccattacgtggaatagcggacacatcgattatgcagacagtgtggagggcagattcacaatctcacgagacaatgctaagaacagcctgtaccttcagatgaactcacttcgcgcggaagataccgccgtatactactgcgccaaagtctcctacttgtctacagcttcgtcgctcgactattggggtcaaggaacgttggtcaccgtctctagtgcctccaccaagggcccatcggtcttccccctggcaccctcctccaagagcacctctgggggcacagcggccctgggctgcctggtcaaggactacttccccgaaccggtgacggtgtcgtggaactcaggcgccctgaccagcggcgtgcacaccttcccggctgtcctacagtcctcaggactctactccctcaaaagcgtggtgaccgtgccctccagcagcttgggcacccagacctacatctgcaacgtgaatcacaagcccagcaacaccaaggtggacaagaaagttgagcccaaatcttgtgacaaaactcacacatgcccaccgtgcccagcacctgaactcctggggggaccgtcagtcttcctcttccccccaaaacccaaggacaccctcatgatctcccggacccctgaggtcacatgcgtggtggtggacgtgagccacgaagaccctgaggtcaagttcaactggtacgtggacggcgtggaggtgcataatgccaagacaaagccgtgtgaggagcagtacggcagcacgtaccgttgtgtcagcgtcctcaccgtcctgcaccaggactggctgaatggcaaggagtacaagtgcaaggtctccaacaaagccctcccagcccccatcgagaaaaccatctccaaagccaaagggcagccccgagaaccacaggtgtacaccctgcccccatcccgggaggagatgaccaagaaccaggtcagcctgacctgcctggtcaaaggcttctatcccagcgacatcgccgtggagtgggagagcaatgggcagccggagaacaactacaagaccacgcctcccgtgctggactccgacggctccttcttcctctatagcaagctcaccgtggacaagagcaggtggcagcaggggaacgtcttctcatgctccgtgatgcatgaggctctgcacaaccactacacgcagaagagcctctccctgtctccgggtggtggcggatcgggaggtggcggatcccaggtacagttgcaggagtcaggtccaggactggtgaagccctcggagaccctctcactcacctgtaccatctccggggacagtgtctctaccaacagtgttgcttggaactggattaggcagcccccagggaaaggccttgagtggataggaaggacatactacaggtccaagtggtataatgattatgcagtttctctgaaaagtcgagtaaccatcagcccagacacatccaagaaccagttctccctgaagctgagctctgtgactgccgcggacacggctgtgtattactgtgcaagagaggatggggatagctactaccgctacggtatggacgtctggggccaagggaccacggtcaccgtctcctcagcctccaccaagggcccatcggtcttccccctggcaccctcctccaagagcacctctgggggcacagcggccctgggctgcctggtcaaggactacttccccgaaccggtgacggtgtcgtggaactcaggcgccctgaccagcggcgtgcacaccttcccggctgtcctacagtcctcaggactctactccctcgagagcgtggtgaccgtgccctccagcagcttgggcacccagacctacatctgcaacgtgaatcacaagcccagcaacaccaaggtggacaagaaagttgagcccaaatcttgt

SEQ ID NO: 16 - protein, 214 aa, synthetic construct; identical to SEQ ID NO: 4
  REGION 1..214: note = source = /note="Description of Artificial Sequence: Synthetic polypeptide"

SEQ ID NO: 17 - protein, 220 aa, synthetic construct
  REGION 1..220: note = source = /note="Description of Artificial Sequence: Synthetic polypeptide"
DIQMTQSPSSLSASVGDRVTITCRSSQSVLYSSNNKNYLVWYQQKPGKVPKLLIYWASTRESGVPSRFSGSGSGTDFTLTISSLQPEDVATYYCQQYYKTPLTFGGGTKVEIKRTVAAPSVFIFPPSDEQLKSGTASVVCLLNNFYPREAKVQWKVDNALQSGNSQESVTEQDSKDSTYSLKSTLTLSKADYEKHKVYACEVTHQGLSSPVTKSFNRGEC

SEQ ID NO: 18 - protein, 687 aa, synthetic construct
  REGION 1..687: note = source = /note="Description of Artificial Sequence: Synthetic polypeptide"
EVQLVESGGGLVQPGRSLRLSCAASGFTFDDYAMHWVRQAPGKGLEWVSAITWNSGHIDYADSVEGRFTISRDNAKNSLYLQMNSLRAEDTAVYYCAKVSYLSTASSLDYWGQGTLVTVSSASTKGPSVFPLAPSSKSTSGGTAALGCLVKDYFPEPVTVSWNSGALTSGVHTFPAVLQSSGLYSLKSVVTVPSSSLGTQTYICNVNHKPSNTKVDKKVEPKSCDKTHTCPPCPAPELLGGPSVFLFPPKPKDTLMISRTPEVTCVVVDVSHEDPEVKFNWYVDGVEVHNAKTKPCEEQYGSTYRCVSVLTVLHQDWLNGKEYKCKVSNKALPAPIEKTISKAKGQPREPQVYTLPPSREEMTKNQVSLTCLVKGFYPSDIAVEWESNGQPENNYKTTPPVLDSDGSFFLYSKLTVDKSRWQQGNVFSCSVMHEALHNHYTQKSLSLSPGGGGSGGGGSQVQLQESGPGLVKPSETLSLTCTISGDSVSTNSVAWNWIRQPPGKGLEWIGRTYYRSKWYNDYAVSLKSRVTISPDTSKNQFSLKLSSVTAADTAVYYCAREDGDSYYRYGMDVWGQGTTVTVSSASTKGPSVFPLAPSSKSTSGGTAALGCLVKDYFPEPVTVSWNSGALTSGVHTFPAVLQSSGLYSLESVVTVPSSSLGTQTYICNVNHKPSNTKVDKKVEPKSC

SEQ ID NO: 19 - DNA, 651 bp, synthetic construct
  misc_feature 1..651: note = source = /note="Description of Artificial Sequence: Synthetic polynucleotide"
  source 1..651: mol_type = other DNA
cagtctgtgctgacgcagccgccctcagtgtctggggccccagggcagagggtcaccatctcctgcactgggagcagttccaacatcggggcaggttatgatgtacactggtaccagcagtttccaggaacagcccccaaactcctcatccaaggtaacagcaatcggccctcaggggtccctgaccgattctctggctccaagtctggcacctcagcctccctggccatcactgggctccaggctgaggatgaggctgattattactgccagtcctatgacagcagcctgagtggttcggtgttcggcggagggaccaagctgaccgtcctaggtcagcccaaggctgccccctcggtcactctgttcccgccctcctctgaggagcttcaagccaacaaggccacactggtgtgtctcataagtgacttctacccgggagccgtgacagtggcctggaaggcagatagcagccccgtcaaggcgggagtggagaccaccacaccctccaaacaaagcaacaacaagtacgcggccgagagctatctgagcctgacgcctgagcagtggaagtcccacagaagctacagctgccaggtcacgcatgaagggagcaccgtggagaagacagtggcccctacagaatgttca

SEQ ID NO: 20 - DNA, 642 bp, synthetic construct; identical to SEQ ID NO: 2
  misc_feature 1..642: note = source = /note="Description of Artificial Sequence: Synthetic polynucleotide"
  source 1..642: mol_type = other DNA

SEQ ID NO: 21 - DNA, 2031 bp, synthetic construct
  misc_feature 1..2031: note = source = /note="Description of Artificial Sequence: Synthetic polynucleotide"
  source 1..2031: mol_type = other DNA
gaggtgcagctggtgcagtctggagcagaggtgaaaaagcccggggagtctctgaagatctcctgtaagacttctgaatacagctttaccagctactggatcggctgggtgcgccagatgcccgggaaaggcctggagtggatggggatcatctatcttggtgactcagataccagatacagcccgtccttccaaggccaggtcaccatctcagccgacaagtccatcagtaccgcctacctgcagtggagcagcctgaaggcctcggacaccgccatgtattactgtgcgagaagtaactggggtcttgactactggggccagggaaccctggtcaccgtctctagtgcctccaccaagggcccatcggtcttccccctggcaccctcctccaagagcacctctgggggcacagcggccctgggctgcctggtcaaggactacttccccgaaccggtgacggtgtcgtggaactcaggcgccctgaccagcggcgtgcacaccttcccggctgtcctacagtcctcaggactctactccctcaaaagcgtggtgaccgtgccctccagcagcttgggcacccagacctacatctgcaacgtgaatcacaagcccagcaacaccaaggtggacaagaaagttgagcccaaatcttgtgacaaaactcacacatgcccaccgtgcccagcacctgaactcctggggggaccgtcagtcttcctcttccccccaaaacccaaggacaccctcatgatctcccggacccctgaggtcacatgcgtggtggtggacgtgagccacgaagaccctgaggtcaagttcaactggtacgtggacggcgtggaggtgcataatgccaagacaaagccgtgtgaggagcagtacggcagcacgtaccgttgtgtcagcgtcctcaccgtcctgcaccaggactggctgaatggcaaggagtacaagtgcaaggtctccaacaaagccctcccagcccccatcgagaaaaccatctccaaagccaaagggcagccccgagaaccacaggtgtacaccctgcccccatcccgggaggagatgaccaagaaccaggtcagcctgacctgcctggtcaaaggcttctatcccagcgacatcgccgtggagtgggagagcaatgggcagccggagaacaactacaagaccacgcctcccgtgctggactccgacggctccttcttcctctatagcaagctcaccgtggacaagagcaggtggcagcaggggaacgtcttctcatgctccgtgatgcatgaggctctgcacaaccactacacgcagaagagcctctccctgtctccgggtggtggcggatcgggaggtggcggatcccaggtgcagttacagcagtcgggcgcaggactgttgaagccttcggagaccctgtccctcacctgcgctgtccatggtgggtccttcagtggttactactggaactggattcgccagccaccagggaaggggctagagtggattggggaaatcaatcatgctggaaacaccaactacaacccgtccctcaagagtcgagtcaccatatcattagacacgtccaagaaccagttctccctgacgctgacctctgtgaccgccgcggacacggctgtgtattactgtgcgagaggatattgtagaagtaccacctgctactttgactactggggccagggaaccctagtcaccgtctcctcagcctccaccaagggcccatcggtcttccccctggcaccctcctccaagagcacctctgggggcacagcggccctgggctgcctggtcaaggactacttccccgaaccggtgacggtgtcgtggaactcaggcgccctgaccagcggcgtgcacaccttcccggctgtcctacagtcctcaggactctactccctcgagagcgtggtgaccgtgccctccagcagcttgggcacccagacctacatctgcaacgtgaatcacaagcccagcaacaccaaggtggacaagaaagttgagcccaaatcttgt

SEQ ID NO: 22 - protein, 217 aa, synthetic construct
  REGION 1..217: note = source = /note="Description of Artificial Sequence: Synthetic polypeptide"
QSVLTQPPSVSGAPGQRVTISCTGSSSNIGAGYDVHWYQQFPGTAPKLLIQGNSNRPSGVPDRFSGSKSGTSASLAITGLQAEDEADYYCQSYDSSLSGSVFGGGTKLTVLGQPKAAPSVTLFPPSSEELQANKATLVCLISDFYPGAVTVAWKADSSPVKAGVETTTPSKQSNNKYAAESYLSLTPEQWKSHRSYSCQVTHEGSTVEKTVAPTECS

SEQ ID NO: 23 - protein, 214 aa, synthetic construct; identical to SEQ ID NO: 5
  REGION 1..214: note = source = /note="Description of Artificial Sequence: Synthetic polypeptide"

SEQ ID NO: 24 - protein, 677 aa, synthetic construct
  REGION 1..677: note = source = /note="Description of Artificial Sequence: Synthetic polypeptide"
EVQLVQSGAEVKKPGESLKISCKTSEYSFTSYWIGWVRQMPGKGLEWMGIIYLGDSDTRYSPSFQGQVTISADKSISTAYLQWSSLKASDTAMYYCARSNWGLDYWGQGTLVTVSSASTKGPSVFPLAPSSKSTSGGTAALGCLVKDYFPEPVTVSWNSGALTSGVHTFPAVLQSSGLYSLKSVVTVPSSSLGTQTYICNVNHKPSNTKVDKKVEPKSCDKTHTCPPCPAPELLGGPSVFLFPPKPKDTLMISRTPEVTCVVVDVSHEDPEVKFNWYVDGVEVHNAKTKPCEEQYGSTYRCVSVLTVLHQDWLNGKEYKCKVSNKALPAPIEKTISKAKGQPREPQVYTLPPSREEMTKNQVSLTCLVKGFYPSDIAVEWESNGQPENNYKTTPPVLDSDGSFFLYSKLTVDKSRWQQGNVFSCSVMHEALHNHYTQKSLSLSPGGGGSGGGGSQVQLQQSGAGLLKPSETLSLTCAVHGGSFSGYYWNWIRQPPGKGLEWIGEINHAGNTNYNPSLKSRVTISLDTSKNQFSLTLTSVTAADTAVYYCARGYCRSTTCYFDYWGQGTLVTVSSASTKGPSVFPLAPSSKSTSGGTAALGCLVKDYFPEPVTVSWNSGALTSGVHTFPAVLQSSGLYSLESVVTVPSSSLGTQTYICNVNHKPSNTKVDKKVEPKSC

SEQ ID NO: 25 - DNA, 651 bp, synthetic construct; identical to SEQ ID NO: 19
  misc_feature 1..651: note = source = /note="Description of Artificial Sequence: Synthetic polynucleotide"
  source 1..651: mol_type = other DNA

SEQ ID NO: 26 - DNA, 642 bp, synthetic construct; identical to SEQ ID NO: 8
  misc_feature 1..642: note = source = /note="Description of Artificial Sequence: Synthetic polynucleotide"
  source 1..642: mol_type = other DNA

SEQ ID NO: 27 - DNA, 2025 bp, synthetic construct
  misc_feature 1..2025: note = source = /note="Description of Artificial Sequence: Synthetic polynucleotide"
  source 1..2025: mol_type = other DNA
gaggtgcagctggtgcagtctggagcagaggtgaaaaagcccggggagtctctgaagatctcctgtaagacttctgaatacagctttaccagctactggatcggctgggtgcgccagatgcccgggaaaggcctggagtggatggggatcatctatcttggtgactcagataccagatacagcccgtccttccaaggccaggtcaccatctcagccgacaagtccatcagtaccgcctacctgcagtggagcagcctgaaggcctcggacaccgccatgtattactgtgcgagaagtaactggggtcttgactactggggccagggaaccctggtcaccgtctctagtgcctccaccaagggcccatcggtcttccccctggcaccctcctccaagagcacctctgggggcacagcggccctgggctgcctggtcaaggactacttccccgaaccggtgacggtgtcgtggaactcaggcgccctgaccagcggcgtgcacaccttcccggctgtcctacagtcctcaggactctactccctcaaaagcgtggtgaccgtgccctccagcagcttgggcacccagacctacatctgcaacgtgaatcacaagcccagcaacaccaaggtggacaagaaagttgagcccaaatcttgtgacaaaactcacacatgcccaccgtgcccagcacctgaactcctggggggaccgtcagtcttcctcttccccccaaaacccaaggacaccctcatgatctcccggacccctgaggtcacatgcgtggtggtggacgtgagccacgaagaccctgaggtcaagttcaactggtacgtggacggcgtggaggtgcataatgccaagacaaagccgtgtgaggagcagtacggcagcacgtaccgttgtgtcagcgtcctcaccgtcctgcaccaggactggctgaatggcaaggagtacaagtgcaaggtctccaacaaagccctcccagcccccatcgagaaaaccatctccaaagccaaagggcagccccgagaaccacaggtgtacaccctgcccccatcccgggaggagatgaccaagaaccaggtcagcctgacctgcctggtcaaaggcttctatcccagcgacatcgccgtggagtgggagagcaatgggcagccggagaacaactacaagaccacgcctcccgtgctggactccgacggctccttcttcctctatagcaagctcaccgtggacaagagcaggtggcagcaggggaacgtcttctcatgctccgtgatgcatgaggctctgcacaaccactacacgcagaagagcctctccctgtctccgggtggtggcggatcgggaggtggcggatcccaggtgcagctgcaggagtcgggcccaggactggtgaagccttcggagaccctgtccctcacctgcactgtctctggtggctccatcagtagttacttctggagctggattcggcagcccccaggtaagggactggagtggattggctatatctattacagtgggcagaccaaatacaacccctccctcaagagtcgagtcaccatatcaatagacacgtccaagaaccagttctccctgaagctgagctctgtgaccgctgcggacacggccgtgtattactgtgcgagagaaactgggagctactacggctttgactactggggccagggaaccctggtcaccgtctcctcagcctccaccaagggcccatcggtcttccccctggcaccctcctccaagagcacctctgggggcacagcggccctgggctgcctggtcaaggactacttccccgaaccggtgacggtgtcgtggaactcaggcgccctgaccagcggcgtgcacaccttcccggctgtcctacagtcctcaggactctactccctcgagagcgtggtgaccgtgccctccagcagcttgggcacccagacctacatctgcaacgtgaatcacaagcccagcaacaccaaggtggacaagaaagttgagcccaaatcttgt

SEQ ID NO: 28 - protein, 217 aa, synthetic construct; identical to SEQ ID NO: 22
  REGION 1..217: note = source = /note="Description of Artificial Sequence: Synthetic polypeptide"

SEQ ID NO: 29 - protein, 214 aa, synthetic construct; identical to SEQ ID NO: 11
  REGION 1..214: note = source = /note="Description of Artificial Sequence: Synthetic polypeptide"

SEQ ID NO: 30 - protein, 675 aa, synthetic construct
  REGION 1..675: note = source = /note="Description of Artificial Sequence: Synthetic polypeptide"
EVQLVQSGAEVKKPGESLKISCKTSEYSFTSYWIGWVRQMPGKGLEWMGIIYLGDSDTRYSPSFQGQVTISADKSISTAYLQWSSLKASDTAMYYCARSNWGLDYWGQGTLVTVSSASTKGPSVFPLAPSSKSTSGGTAALGCLVKDYFPEPVTVSWNSGALTSGVHTFPAVLQSSGLYSLKSVVTVPSSSLGTQTYICNVNHKPSNTKVDKKVEPKSCDKTHTCPPCPAPELLGGPSVFLFPPKPKDTLMISRTPEVTCVVVDVSHEDPEVKFNWYVDGVEVHNAKTKPCEEQYGSTYRCVSVLTVLHQDWLNGKEYKCKVSNKALPAPIEKTISKAKGQPREPQVYTLPPSREEMTKNQVSLTCLVKGFYPSDIAVEWESNGQPENNYKTTPPVLDSDGSFFLYSKLTVDKSRWQQGNVFSCSVMHEALHNHYTQKSLSLSPGGGGSGGGGSQVQLQESGPGLVKPSETLSLTCTVSGGSISSYFWSWIRQPPGKGLEWIGYIYYSGQTKYNPSLKSRVTISIDTSKNQFSLKLSSVTAADTAVYYCARETGSYYGFDYWGQGTLVTVSSASTKGPSVFPLAPSSKSTSGGTAALGCLVKDYFPEPVTVSWNSGALTSGVHTFPAVLQSSGLYSLESVVTVPSSSLGTQTYICNVNHKPSNTKVDKKVEPKSC

SEQ ID NO: 31 - DNA, 651 bp, synthetic construct; identical to SEQ ID NO: 19
  misc_feature 1..651: note = source = /note="Description of Artificial Sequence: Synthetic polynucleotide"
  source 1..651: mol_type = other DNA

SEQ ID NO: 32 - DNA, 660 bp, synthetic construct; identical to SEQ ID NO: 14
  misc_feature 1..660: note = source = /note="Description of Artificial Sequence: Synthetic polynucleotide"
  source 1..660: mol_type = other DNA

SEQ ID NO: 33 - DNA, 2046 bp, synthetic construct
  misc_feature 1..2046: note = source = /note="Description of Artificial Sequence: Synthetic polynucleotide"
  source 1..2046: mol_type = other DNA
gaggtgcagctggtgcagtctggagcagaggtgaaaaagcccggggagtctctgaagatctcctgtaagacttctgaatacagctttaccagctactggatcggctgggtgcgccagatgcccgggaaaggcctggagtggatggggatcatctatcttggtgactcagataccagatacagcccgtccttccaaggccaggtcaccatctcagccgacaagtccatcagtaccgcctacctgcagtggagcagcctgaaggcctcggacaccgccatgtattactgtgcgagaagtaactggggtcttgactactggggccagggaaccctggtcaccgtctctagtgcctccaccaagggcccatcggtcttccccctggcaccctcctccaagagcacctctgggggcacagcggccctgggctgcctggtcaaggactacttccccgaaccggtgacggtgtcgtggaactcaggcgccctgaccagcggcgtgcacaccttcccggctgtcctacagtcctcaggactctactccctcaaaagcgtggtgaccgtgccctccagcagcttgggcacccagacctacatctgcaacgtgaatcacaagcccagcaacaccaaggtggacaagaaagttgagcccaaatcttgtgacaaaactcacacatgcccaccgtgcccagcacctgaactcctggggggaccgtcagtcttcctcttccccccaaaacccaaggacaccctcatgatctcccggacccctgaggtcacatgcgtggtggtggacgtgagccacgaagaccctgaggtcaagttcaactggtacgtggacggcgtggaggtgcataatgccaagacaaagccgtgtgaggagcagtacggcagcacgtaccgttgtgtcagcgtcctcaccgtcctgcaccaggactggctgaatggcaaggagtacaagtgcaaggtctccaacaaagccctcccagcccccatcgagaaaaccatctccaaagccaaagggcagccccgagaaccacaggtgtacaccctgcccccatcccgggaggagatgaccaagaaccaggtcagcctgacctgcctggtcaaaggcttctatcccagcgacatcgccgtggagtgggagagcaatgggcagccggagaacaactacaagaccacgcctcccgtgctggactccgacggctccttcttcctctatagcaagctcaccgtggacaagagcaggtggcagcaggggaacgtcttctcatgctccgtgatgcatgaggctctgcacaaccactacacgcagaagagcctctccctgtctccgggtggtggcggatcgggaggtggcggatcccaggtacagttgcaggagtcaggtccaggactggtgaagccctcggagaccctctcactcacctgtaccatctccggggacagtgtctctaccaacagtgttgcttggaactggattaggcagcccccagggaaaggccttgagtggataggaaggacatactacaggtccaagtggtataatgattatgcagtttctctgaaaagtcgagtaaccatcagcccagacacatccaagaaccagttctccctgaagctgagctctgtgactgccgcggacacggctgtgtattactgtgcaagagaggatggggatagctactaccgctacggtatggacgtctggggccaagggaccacggtcaccgtctcctcagcctccaccaagggcccatcggtcttccccctggcaccctcctccaagagcacctctgggggcacagcggccctgggctgcctggtcaaggactacttccccgaaccggtgacggtgtcgtggaactcaggcgccctgaccagcggcgtgcacaccttcccggctgtcctacagtcctcaggactctactccctcgagagcgtggtgaccgtgccctccagcagcttgggcacccagacctacatctgcaacgtgaatcacaagcccagcaacaccaaggtggacaagaaagttgagcccaaatcttgt

SEQ ID NO: 34 - protein, 217 aa, synthetic construct; identical to SEQ ID NO: 22
  REGION 1..217: note = source = /note="Description of Artificial Sequence: Synthetic polypeptide"

SEQ ID NO: 35 - protein, 220 aa, synthetic construct; identical to SEQ ID NO: 17
  REGION 1..220: note = source = /note="Description of Artificial Sequence: Synthetic polypeptide"

SEQ ID NO: 36 - protein, 682 aa, synthetic construct
  REGION 1..682: note = source = /note="Description of Artificial Sequence: Synthetic polypeptide"
EVQLVQSGAEVKKPGESLKISCKTSEYSFTSYWIGWVRQMPGKGLEWMGIIYLGDSDTRYSPSFQGQVTISADKSISTAYLQWSSLKASDTAMYYCARSNWGLDYWGQGTLVTVSSASTKGPSVFPLAPSSKSTSGGTAALGCLVKDYFPEPVTVSWNSGALTSGVHTFPAVLQSSGLYSLKSVVTVPSSSLGTQTYICNVNHKPSNTKVDKKVEPKSCDKTHTCPPCPAPELLGGPSVFLFPPKPKDTLMISRTPEVTCVVVDVSHEDPEVKFNWYVDGVEVHNAKTKPCEEQYGSTYRCVSVLTVLHQDWLNGKEYKCKVSNKALPAPIEKTISKAKGQPREPQVYTLPPSREEMTKNQVSLTCLVKGFYPSDIAVEWESNGQPENNYKTTPPVLDSDGSFFLYSKLTVDKSRWQQGNVFSCSVMHEALHNHYTQKSLSLSPGGGGSGGGGSQVQLQESGPGLVKPSETLSLTCTISGDSVSTNSVAWNWIRQPPGKGLEWIGRTYYRSKWYNDYAVSLKSRVTISPDTSKNQFSLKLSSVTAADTAVYYCAREDGDSYYRYGMDVWGQGTTVTVSSASTKGPSVFPLAPSSKSTSGGTAALGCLVKDYFPEPVTVSWNSGALTSGVHTFPAVLQSSGLYSLESVVTVPSSSLGTQTYICNVNHKPSNTKVDKKVEPKSC

SEQ ID NO: 37 - DNA, 642 bp, synthetic construct
  misc_feature 1..642: note = source = /note="Description of Artificial Sequence: Synthetic polynucleotide"
  source 1..642: mol_type = other DNA
gaaattgtgttgacgcagtctccaggcaccctgtctttgtctccaggggaaagagccaccctctcctgcagggccagtcagagtgttagaagcagttacttagcctggtaccagcagaaacctggccaggctcccaggctcctcatctatggtgcatccagcagggccactggcatcccagacaggttcagtggcagtgggtctgggacagacttcactctcaccatcagcagactggagcctgaagattttgcagtgtattactgtcagcagtatggtagctcacctaccttcggccaagggacacgactggagattaaacgaacggtggctgcaccatctgtcttcatcttcccgccatctgatgagcagttgaaatctggtaccgcctctgttgtgtgcctgctgaataacttctatcccagagaggccaaagtacagtggaaggtggataacgccctccaatcgggtaactcccaggagagtgtcacagagcaggacagcaaggacagcacctacagcctcgagagcaccctgacgctgagcaaagcagactacgagaaacacaaagtctacgcctgcgaagtcacccatcagggcctgagctcgcccgtcacaaagagcttcaacaggggagagtgt

SEQ ID NO: 38 - DNA, 642 bp, synthetic construct
  misc_feature 1..642: note = source = /note="Description of Artificial Sequence: Synthetic polynucleotide"
  source 1..642: mol_type = other DNA
gatatccaaatgacacaatcaccatcgtcgctttcagcgtctgttggcgaccgtgtgacgattacctgtcgcgcgtcccagggaatccggaattacctcgcatggtatcagcaaaaacccggaaaagcaccgaagctcctgatctatgccgcctcgactcttcagagtggtgtgccgtcgaggtttagcgggtccgggtcaggtacggactttactctcacaatttccagcctgcagcccgaagatgtagctacctattactgccagagatacaaccgagcgccttacacattcggacaagggacaaaagtcgagatcaagcgtacggtggctgcaccatctgtcttcatcttcccgccatctgatgagcagttgaaatctggaactgcctctgttgtgtgcctgctgaataacttctatcccagagaggccaaagtacagtggaaggtggataacgccctccaatcgggtaactcccaggagagtgtcacagagcaggacagcaaggacagcacctacagcctcaagagcaccctgacgctgagcaaagcagactacgagaaacacaaagtctacgcctgcgaagtcacccatcagggcctgagctcgcccgtcacaaagagcttcaacaggggagagtgt

SEQ ID NO: 39 - DNA, 2046 bp, synthetic construct
  misc_feature 1..2046: note = source = /note="Description of Artificial Sequence: Synthetic polynucleotide"
  source 1..2046: mol_type = other DNA
caggtgcagttacagcagtcgggcgcaggactgttgaagccttcggagaccctgtccctcacctgcgctgtccatggtgggtccttcagtggttactactggaactggatccgccagccaccagggaaggggctagagtggattggggaaatcaatcatgctggaaacaccaactacaacccgtccctcaagagtcgagtcaccatatcattagacacgtccaagaaccagttctccctgacgctgacctctgtgaccgccgcggacacggctgtgtattactgtgcgagaggatattgtagaagtaccacctgctactttgactactggggccagggaaccctagtcaccgtctcctcagcctccaccaagggcccatcggtcttccccctggcaccctcctccaagagcacctctgggggcacagcggccctgggctgcctggtcaaggactacttccccgaaccggtgacggtgtcgtggaactcaggcgccctgaccagcggcgtgcacaccttcccggctgtcctacagtcctcaggactctactccctcaaaagcgtggtgaccgtgccctccagcagcttgggcacccagacctacatctgcaacgtgaatcacaagcccagcaacaccaaggtggacaagaaagttgagcccaaatcttgtgacaaaactcacacatgcccaccgtgcccagcacctgaactcctggggggaccgtcagtcttcctcttccccccaaaacccaaggacaccctcatgatctcccggacccctgaggtcacatgcgtggtggtggacgtgagccacgaagaccctgaggtcaagttcaactggtacgtggacggcgtggaggtgcataatgccaagacaaagccgtgtgaggagcagtacggcagcacgtaccgttgtgtcagcgtcctcaccgtcctgcaccaggactggctgaatggcaaggagtacaagtgcaaggtctccaacaaagccctcccagcccccatcgagaaaaccatctccaaagccaaagggcagccccgagaaccacaggtgtacaccctgcccccatcccgggaggagatgaccaagaaccaggtcagcctgacctgcctggtcaaaggcttctatcccagcgacatcgccgtggagtgggagagcaatgggcagccggagaacaactacaagaccacgcctcccgtgctggactccgacggctccttcttcctctatagcaagctcaccgtggacaagagcaggtggcagcaggggaacgtcttctcatgctccgtgatgcatgaggctctgcacaaccactacacgcagaagagcctctccctgtctccgggtggtggcggatcgggaggtggcggatccgaggtacaactggtggaatcaggtggaggtttggtgcagccggggagatcgctcaggcttagctgtgcggcatcggggtttactttcgatgattatgcgatgcattgggtccggcaagcgcctggaaaagggctcgagtgggtttccgccattacgtggaatagcggacacatcgattatgcagacagtgtggagggcagattcacaatctcacgagacaatgctaagaacagcctgtaccttcagatgaactcacttcgcgcggaagataccgccgtatactactgcgccaaagtctcctacttgtctacagcttcgtcgctcgactattggggtcaaggaacgttggtcaccgtctctagtgcctccaccaagggcccatcggtcttccccctggcaccctcctccaagagcacctctgggggcacagcggccctgggctgcctggtcaaggactacttccccgaaccggtgacggtgtcgtggaactcaggcgccctgaccagcggcgtgcacaccttcccggctgtcctacagtcctcaggactctactccctcgagagcgtggtgaccgtgccctccagcagcttgggcacccagacctacatctgcaacgtgaatcacaagcccagcaacaccaaggtggacaagaaagttgagcccaaatcttgt

SEQ ID NO: 40 - protein, 214 aa, synthetic construct
  REGION 1..214: note = source = /note="Description of Artificial Sequence: Synthetic polypeptide"
EIVLTQSPGTLSLSPGERATLSCRASQSVRSSYLAWYQQKPGQAPRLLIYGASSRATGIPDRFSGSGSGTDFTLTISRLEPEDFAVYYCQQYGSSPTFGQGTRLEIKRTVAAPSVFIFPPSDEQLKSGTASVVCLLNNFYPREAKVQWKVDNALQSGNSQESVTEQDSKDSTYSLESTLTLSKADYEKHKVYACEVTHQGLSSPVTKSFNRGEC

SEQ ID NO: 41 - protein, 214 aa, synthetic construct
  REGION 1..214: note = source = /note="Description of Artificial Sequence: Synthetic polypeptide"
DIQMTQSPSSLSASVGDRVTITCRASQGIRNYLAWYQQKPGKAPKLLIYAASTLQSGVPSRFSGSGSGTDFTLTISSLQPEDVATYYCQRYNRAPYTFGQGTKVEIKRTVAAPSVFIFPPSDEQLKSGTASVVCLLNNFYPREAKVQWKVDNALQSGNSQESVTEQDSKDSTYSLKSTLTLSKADYEKHKVYACEVTHQGLSSPVTKSFNRGEC

SEQ ID NO: 42 - protein, 682 aa, synthetic construct
  REGION 1..682: note = source = /note="Description of Artificial Sequence: Synthetic polypeptide"
QVQLQQSGAGLLKPSETLSLTCAVHGGSFSGYYWNWIRQPPGKGLEWIGEINHAGNTNYNPSLKSRVTISLDTSKNQFSLTLTSVTAADTAVYYCARGYCRSTTCYFDYWGQGTLVTVSSASTKGPSVFPLAPSSKSTSGGTAALGCLVKDYFPEPVTVSWNSGALTSGVHTFPAVLQSSGLYSLKSVVTVPSSSLGTQTYICNVNHKPSNTKVDKKVEPKSCDKTHTCPPCPAPELLGGPSVFLFPPKPKDTLMISRTPEVTCVVVDVSHEDPEVKFNWYVDGVEVHNAKTKPCEEQYGSTYRCVSVLTVLHQDWLNGKEYKCKVSNKALPAPIEKTISKAKGQPREPQVYTLPPSREEMTKNQVSLTCLVKGFYPSDIAVEWESNGQPENNYKTTPPVLDSDGSFFLYSKLTVDKSRWQQGNVFSCSVMHEALHNHYTQKSLSLSPGGGGSGGGGSEVQLVESGGGLVQPGRSLRLSCAASGFTFDDYAMHWVRQAPGKGLEWVSAITWNSGHIDYADSVEGRFTISRDNAKNSLYLQMNSLRAEDTAVYYCAKVSYLSTASSLDYWGQGTLVTVSSASTKGPSVFPLAPSSKSTSGGTAALGCLVKDYFPEPVTVSWNSGALTSGVHTFPAVLQSSGLYSLESVVTVPSSSLGTQTYICNVNHKPSNTKVDKKVEPKSC

SEQ ID NO: 43 - DNA, 642 bp, synthetic construct; identical to SEQ ID NO: 37
  misc_feature 1..642: note = source = /note="Description of Artificial Sequence: Synthetic polynucleotide"
  source 1..642: mol_type = other DNA

SEQ ID NO: 44 - DNA, 651 bp, synthetic construct
  misc_feature 1..651: note = source = /note="Description of Artificial Sequence: Synthetic polynucleotide"
  source 1..651: mol_type = other DNA
cagtctgtgctgacgcagccgccctcagtgtctggggccccagggcagagggtcaccatctcctgcactgggagcagttccaacatcggggcaggttatgatgtacactggtaccagcagtttccaggaacagcccccaaactcctcatccaaggtaacagcaatcggccctcaggggtccctgaccgattctctggctccaagtctggcacctcagcctccctggccatcactgggctccaggctgaggatgaggctgattattactgccagtcctatgacagcagcctgagtggttcggtgttcggcggagggaccaagctgaccgtcctaggtcagcccaaggctgccccctcggtcactctgttcccgccctcctctgaggagcttcaagccaacaaggccacactggtgtgtctcataagtgacttctacccgggagccgtgacagtggcctggaaggcagatagcagccccgtcaaggcgggagtggagaccaccacaccctccaaacaaagcaacaacaagtacgcggccaagagctatctgagcctgacgcctgagcagtggaagtcccacagaagctacagctgccaggtcacgcatgaagggagcaccgtggagaagacagtggcccctacagaatgttca

SEQ ID NO: 45 - DNA, 2031 bp, synthetic construct
  misc_feature 1..2031: note = source = /note="Description of Artificial Sequence: Synthetic polynucleotide"
  source 1..2031: mol_type = other DNA
caggtgcagttacagcagtcgggcgcaggactgttgaagccttcggagaccctgtccctcacctgcgctgtccatggtgggtccttcagtggttactactggaactggatccgccagccaccagggaaggggctagagtggattggggaaatcaatcatgctggaaacaccaactacaacccgtccctcaagagtcgagtcaccatatcattagacacgtccaagaaccagttctccctgacgctgacctctgtgaccgccgcggacacggctgtgtattactgtgcgagaggatattgtagaagtaccacctgctactttgactactggggccagggaaccctagtcaccgtctcctcagcctccaccaagggcccatcggtcttccccctggcaccctcctccaagagcacctctgggggcacagcggccctgggctgcctggtcaaggactacttccccgaaccggtgacggtgtcgtggaactcaggcgccctgaccagcggcgtgcacaccttcccggctgtcctacagtcctcaggactctactccctcaaaagcgtggtgaccgtgccctccagcagcttgggcacccagacctacatctgcaacgtgaatcacaagcccagcaacaccaaggtggacaagaaagttgagcccaaatcttgtgacaaaactcacacatgcccaccgtgcccagcacctgaactcctggggggaccgtcagtcttcctcttccccccaaaacccaaggacaccctcatgatctcccggacccctgaggtcacatgcgtggtggtggacgtgagccacgaagaccctgaggtcaagttcaactggtacgtggacggcgtggaggtgcataatgccaagacaaagccgtgtgaggagcagtacggcagcacgtaccgttgtgtcagcgtcctcaccgtcctgcaccaggactggctgaatggcaaggagtacaagtgcaaggtctccaacaaagccctcccagcccccatcgagaaaaccatctccaaagccaaagggcagccccgagaaccacaggtgtacaccctgcccccatcccgggaggagatgaccaagaaccaggtcagcctgacctgcctggtcaaaggcttctatcccagcgacatcgccgtggagtgggagagcaatgggcagccggagaacaactacaagaccacgcctcccgtgctggactccgacggctccttcttcctctatagcaagctcaccgtggacaagagcaggtggcagcaggggaacgtcttctcatgctccgtgatgcatgaggctctgcacaaccactacacgcagaagagcctctccctgtctccgggtggtggcggatcgggaggtggcggatccgaggtgcagctggtgcagtctggagcagaggtgaaaaagcccggggagtctctgaagatctcctgtaagacttctgaatacagctttaccagctactggatcggctgggtgcgccagatgcccgggaaaggcctggagtggatggggatcatctatcttggtgactcagataccagatacagcccgtccttccaaggccaggtcaccatctcagccgacaagtccatcagtaccgcctacctgcagtggagcagcctgaaggcctcggacaccgccatgtattactgtgcgagaagtaactggggtcttgactactggggccagggaaccctggtcaccgtctctagtgcctccaccaagggcccatcggtcttccccctggcaccctcctccaagagcacctctgggggcacagcggccctgggctgcctggtcaaggactacttccccgaaccggtgacggtgtcgtggaactcaggcgccctgaccagcggcgtgcacaccttcccggctgtcctacagtcctcaggactctactccctcgagagcgtggtgaccgtgccctccagcagcttgggcacccagacctacatctgcaacgtgaatcacaagcccagcaacaccaaggtggacaagaaagttgagcccaaatcttgt

SEQ ID NO: 46 - protein, 214 aa, synthetic construct; identical to SEQ ID NO: 40
  REGION 1..214: note = source = /note="Description of Artificial Sequence: Synthetic polypeptide"

SEQ ID NO: 47 - protein, 217 aa, synthetic construct
  REGION 1..217: note = source = /note="Description of Artificial Sequence: Synthetic polypeptide"
QSVLTQPPSVSGAPGQRVTISCTGSSSNIGAGYDVHWYQQFPGTAPKLLIQGNSNRPSGVPDRFSGSKSGTSASLAITGLQAEDEADYYCQSYDSSLSGSVFGGGTKLTVLGQPKAAPSVTLFPPSSEELQANKATLVCLISDFYPGAVTVAWKADSSPVKAGVETTTPSKQSNNKYAAKSYLSLTPEQWKSHRSYSCQVTHEGSTVEKTVAPTECS

SEQ ID NO: 48 - protein, 677 aa, synthetic construct
  REGION 1..677: note = source = /note="Description of Artificial Sequence: Synthetic polypeptide"
QVQLQQSGAGLLKPSETLSLTCAVHGGSFSGYYWNWIRQPPGKGLEWIGEINHAGNTNYNPSLKSRVTISLDTSKNQFSLTLTSVTAADTAVYYCARGYCRSTTCYFDYWGQGTLVTVSSASTKGPSVFPLAPSSKSTSGGTAALGCLVKDYFPEPVTVSWNSGALTSGVHTFPAVLQSSGLYSLKSVVTVPSSSLGTQTYICNVNHKPSNTKVDKKVEPKSCDKTHTCPPCPAPELLGGPSVFLFPPKPKDTLMISRTPEVTCVVVDVSHEDPEVKFNWYVDGVEVHNAKTKPCEEQYGSTYRCVSVLTVLHQDWLNGKEYKCKVSNKALPAPIEKTISKAKGQPREPQVYTLPPSREEMTKNQVSLTCLVKGFYPSDIAVEWESNGQPENNYKTTPPVLDSDGSFFLYSKLTVDKSRWQQGNVFSCSVMHEALHNHYTQKSLSLSPGGGGSGGGGSEVQLVQSGAEVKKPGESLKISCKTSEYSFTSYWIGWVRQMPGKGLEWMGIIYLGDSDTRYSPSFQGQVTISADKSISTAYLQWSSLKASDTAMYYCARSNWGLDYWGQGTLVTVSSASTKGPSVFPLAPSSKSTSGGTAALGCLVKDYFPEPVTVSWNSGALTSGVHTFPAVLQSSGLYSLESVVTVPSSSLGTQTYICNVNHKPSNTKVDKKVEPKSC

SEQ ID NO: 49 - DNA, 642 bp, synthetic construct
  misc_feature 1..642: note = source = /note="Description of Artificial Sequence: Synthetic polynucleotide"
  source 1..642: mol_type = other DNA
gacatccagatgacccagtctccatcctccctgtctgcatctgtaggagacagagtcaccatcacttgccgggcaagtcagagcattaacaactatttaaattggtatcagcagagaccagggaaagcccctaagctcctgatctatgctgcatccagtttgcaaagtggggtcccatcaaggttcagtggcagtggatctgggacagatttcactctcaccatcagcagtctgcaacctgaagattttgcaacttactactgtcaacagagttacagtacccctcggacgttcggccaagggaccaagctggaaatcaaacgaacggtggctgcaccatctgtcttcatcttcccgccatctgatgagcagttgaaatctggtaccgcctctgttgtgtgcctgctgaataacttctatcccagagaggccaaagtacagtggaaggtggataacgccctccaatcgggtaactcccaggagagtgtcacagagcaggacagcaaggacagcacctacagcctcgagagcaccctgacgctgagcaaagcagactacgagaaacacaaagtctacgcctgcgaagtcacccatcagggcctgagctcgcccgtcacaaagagcttcaacaggggagagtgt

SEQ ID NO: 50 - DNA, 642 bp, synthetic construct; identical to SEQ ID NO: 38
  misc_feature 1..642: note = source = /note="Description of Artificial Sequence: Synthetic polynucleotide"
  source 1..642: mol_type = other DNA

SEQ ID NO: 51 - DNA, 2040 bp, synthetic construct
  misc_feature 1..2040: note = source = /note="Description of Artificial Sequence: Synthetic polynucleotide"
  source 1..2040: mol_type = other DNA
caggtgcagctgcaggagtcgggcccaggactggtgaagccttcggagaccctgtccctcacctgcactgtctctggtggctccatcagtagttacttctggagctggatccggcagcccccaggtaagggactggagtggattggctatatctattacagtgggcagaccaaatacaacccctccctcaagagtcgagtcaccatatcaatagacacgtccaagaaccagttctccctgaagctgagctctgtgaccgctgcggacacggccgtgtattactgtgcgagagaaactgggagctactacggctttgactactggggccagggaaccctggtcaccgtctcctcagcctccaccaagggcccatcggtcttccccctggcaccctcctccaagagcacctctgggggcacagcggccctgggctgcctggtcaaggactacttccccgaaccggtgacggtgtcgtggaactcaggcgccctgaccagcggcgtgcacaccttcccggctgtcctacagtcctcaggactctactccctcaaaagcgtggtgaccgtgccctccagcagcttgggcacccagacctacatctgcaacgtgaatcacaagcccagcaacaccaaggtggacaagaaagttgagcccaaatcttgtgacaaaactcacacatgcccaccgtgcccagcacctgaactcctggggggaccgtcagtcttcctcttccccccaaaacccaaggacaccctcatgatctcccggacccctgaggtcacatgcgtggtggtggacgtgagccacgaagaccctgaggtcaagttcaactggtacgtggacggcgtggaggtgcataatgccaagacaaagccgtgtgaggagcagtacggcagcacgtaccgttgtgtcagcgtcctcaccgtcctgcaccaggactggctgaatggcaaggagtacaagtgcaaggtctccaacaaagccctcccagcccccatcgagaaaaccatctccaaagccaaagggcagccccgagaaccacaggtgtacaccctgcccccatcccgggaggagatgaccaagaaccaggtcagcctgacctgcctggtcaaaggcttctatcccagcgacatcgccgtggagtgggagagcaatgggcagccggagaacaactacaagaccacgcctcccgtgctggactccgacggctccttcttcctctatagcaagctcaccgtggacaagagcaggtggcagcaggggaacgtcttctcatgctccgtgatgcatgaggctctgcacaaccactacacgcagaagagcctctccctgtctccgggtggtggcggatcgggaggtggcggatccgaggtacaactggtggaatcaggtggaggtttggtgcagccggggagatcgctcaggcttagctgtgcggcatcggggtttactttcgatgattatgcgatgcattgggtccggcaagcgcctggaaaagggctcgagtgggtttccgccattacgtggaatagcggacacatcgattatgcagacagtgtggagggcagattcacaatctcacgagacaatgctaagaacagcctgtaccttcagatgaactcacttcgcgcggaagataccgccgtatactactgcgccaaagtctcctacttgtctacagcttcgtcgctcgactattggggtcaaggaacgttggtcaccgtctctagtgcctccaccaagggcccatcggtcttccccctggcaccctcctccaagagcacctctgggggcacagcggccctgggctgcctggtcaaggactacttccccgaaccggtgacggtgtcgtggaactcaggcgccctgaccagcggcgtgcacaccttcccggctgtcctacagtcctcaggactctactccctcgagagcgtggtgaccgtgccctccagcagcttgggcacccagacctacatctgcaacgtgaatcacaagcccagcaacaccaaggtggacaagaaagttgagcccaaatcttgt

SEQ ID NO: 52 - protein, 214 aa, synthetic construct
  REGION 1..214: note = source = /note="Description of Artificial Sequence: Synthetic polypeptide"
DIQMTQSPSSLSASVGDRVTITCRASQSINNYLNWYQQRPGKAPKLLIYAASSLQSGVPSRFSGSGSGTDFTLTISSLQPEDFATYYCQQSYSTPRTFGQGTKLEIKRTVAAPSVFIFPPSDEQLKSGTASVVCLLNNFYPREAKVQWKVDNALQSGNSQESVTEQDSKDSTYSLESTLTLSKADYEKHKVYACEVTHQGLSSPVTKSFNRGEC

SEQ ID NO: 53 - protein, 214 aa, synthetic construct; identical to SEQ ID NO: 41
  REGION 1..214: note = source = /note="Description of Artificial Sequence: Synthetic polypeptide"

SEQ ID NO: 54 - protein, 680 aa, synthetic construct
  REGION 1..680: note = source = /note="Description of Artificial Sequence: Synthetic polypeptide"
QVQLQESGPGLVKPSETLSLTCTVSGGSISSYFWSWIRQPPGKGLEWIGYIYYSGQTKYNPSLKSRVTISIDTSKNQFSLKLSSVTAADTAVYYCARETGSYYGFDYWGQGTLVTVSSASTKGPSVFPLAPSSKSTSGGTAALGCLVKDYFPEPVTVSWNSGALTSGVHTFPAVLQSSGLYSLKSVVTVPSSSLGTQTYICNVNHKPSNTKVDKKVEPKSCDKTHTCPPCPAPELLGGPSVFLFPPKPKDTLMISRTPEVTCVVVDVSHEDPEVKFNWYVDGVEVHNAKTKPCEEQYGSTYRCVSVLTVLHQDWLNGKEYKCKVSNKALPAPIEKTISKAKGQPREPQVYTLPPSREEMTKNQVSLTCLVKGFYPSDIAVEWESNGQPENNYKTTPPVLDSDGSFFLYSKLTVDKSRWQQGNVFSCSVMHEALHNHYTQKSLSLSPGGGGSGGGGSEVQLVESGGGLVQPGRSLRLSCAASGFTFDDYAMHWVRQAPGKGLEWVSAITWNSGHIDYADSVEGRFTISRDNAKNSLYLQMNSLRAEDTAVYYCAKVSYLSTASSLDYWGQGTLVTVSSASTKGPSVFPLAPSSKSTSGGTAALGCLVKDYFPEPVTVSWNSGALTSGVHTFPAVLQSSGLYSLESVVTVPSSSLGTQTYICNVNHKPSNTKVDKKVEPKSC

SEQ ID NO: 55 - DNA, 642 bp, synthetic construct; identical to SEQ ID NO: 49
  misc_feature 1..642: note = source = /note="Description of Artificial Sequence: Synthetic polynucleotide"
  source 1..642: mol_type = other DNA

SEQ ID NO: 56 - DNA, 651 bp, synthetic construct; identical to SEQ ID NO: 44
  misc_feature 1..651: note = source = /note="Description of Artificial Sequence: Synthetic polynucleotide"
  source 1..651: mol_type = other DNA

SEQ ID NO: 57 - DNA, 2025 bp, synthetic construct
  misc_feature 1..2025: note = source = /note="Description of Artificial Sequence: Synthetic polynucleotide"
  source 1..2025: mol_type = other DNA
caggtgcagctgcaggagtcgggcccaggactggtgaagccttcggagaccctgtccctcacctgcactgtctctggtggctccatcagtagttacttctggagctggatccggcagcccccaggtaagggactggagtggattggctatatctattacagtgggcagaccaaatacaacccctccctcaagagtcgagtcaccatatcaatagacacgtccaagaaccagttctccctgaagctgagctctgtgaccgctgcggacacggccgtgtattactgtgcgagagaaactgggagctactacggctttgactactggggccagggaaccctggtcaccgtctcctcagcctccaccaagggcccatcggtcttccccctggcaccctcctccaagagcacctctgggggcacagcggccctgggctgcctggtcaaggactacttccccgaaccggtgacggtgtcgtggaactcaggcgccctgaccagcggcgtgcacaccttcccggctgtcctacagtcctcaggactctactccctcaaaagcgtggtgaccgtgccctccagcagcttgggcacccagacctacatctgcaacgtgaatcacaagcccagcaacaccaaggtggacaagaaagttgagcccaaatcttgtgacaaaactcacacatgcccaccgtgcccagcacctgaactcctggggggaccgtcagtcttcctcttccccccaaaacccaaggacaccctcatgatctcccggacccctgaggtcacatgcgtggtggtggacgtgagccacgaagaccctgaggtcaagttcaactggtacgtggacggcgtggaggtgcataatgccaagacaaagccgtgtgaggagcagtacggcagcacgtaccgttgtgtcagcgtcctcaccgtcctgcaccaggactggctgaatggcaaggagtacaagtgcaaggtctccaacaaagccctcccagcccccatcgagaaaaccatctccaaagccaaagggcagccccgagaaccacaggtgtacaccctgcccccatcccgggaggagatgaccaagaaccaggtcagcctgacctgcctggtcaaaggcttctatcccagcgacatcgccgtggagtgggagagcaatgggcagccggagaacaactacaagaccacgcctcccgtgctggactccgacggctccttcttcctctatagcaagctcaccgtggacaagagcaggtggcagcaggggaacgtcttctcatgctccgtgatgcatgaggctctgcacaaccactacacgcagaagagcctctccctgtctccgggtggtggcggatcgggaggtggcggatccgaggtgcagctggtgcagtctggagcagaggtgaaaaagcccggggagtctctgaagatctcctgtaagacttctgaatacagctttaccagctactggatcggctgggtgcgccagatgcccgggaaaggcctggagtggatggggatcatctatcttggtgactcagataccagatacagcccgtccttccaaggccaggtcaccatctcagccgacaagtccatcagtaccgcctacctgcagtggagcagcctgaaggcctcggacaccgccatgtattactgtgcgagaagtaactggggtcttgactactggggccagggaaccctggtcaccgtctctagtgcctccaccaagggcccatcggtcttccccctggcaccctcctccaagagcacctctgggggcacagcggccctgggctgcctggtcaaggactacttccccgaaccggtgacggtgtcgtggaactcaggcgccctgaccagcggcgtgcacaccttcccggctgtcctacagtcctcaggactctactccctcgagagcgtggtgaccgtgccctccagcagcttgggcacccagacctacatctgcaacgtgaatcacaagcccagcaacaccaaggtggacaagaaagttgagcccaaatcttgt

SEQ ID NO: 58 - protein, 214 aa, synthetic construct; identical to SEQ ID NO: 52
  REGION 1..214: note = source = /note="Description of Artificial Sequence: Synthetic polypeptide"

SEQ ID NO: 59 - protein, 217 aa, synthetic construct; identical to SEQ ID NO: 47
  REGION 1..217: note = source = /note="Description of Artificial Sequence: Synthetic polypeptide"

SEQ ID NO: 60 - protein, 675 aa, synthetic construct
  REGION 1..675: note = source = /note="Description of Artificial Sequence: Synthetic polypeptide"
QVQLQESGPGLVKPSETLSLTCTVSGGSISSYFWSWIRQPPGKGLEWIGYIYYSGQTKYNPSLKSRVTISIDTSKNQFSLKLSSVTAADTAVYYCARETGSYYGFDYWGQGTLVTVSSASTKGPSVFPLAPSSKSTSGGTAALGCLVKDYFPEPVTVSWNSGALTSGVHTFPAVLQSSGLYSLKSVVTVPSSSLGTQTYICNVNHKPSNTKVDKKVEPKSCDKTHTCPPCPAPELLGGPSVFLFPPKPKDTLMISRTPEVTCVVVDVSHEDPEVKFNWYVDGVEVHNAKTKPCEEQYGSTYRCVSVLTVLHQDWLNGKEYKCKVSNKALPAPIEKTISKAKGQPREPQVYTLPPSREEMTKNQVSLTCLVKGFYPSDIAVEWESNGQPENNYKTTPPVLDSDGSFFLYSKLTVDKSRWQQGNVFSCSVMHEALHNHYTQKSLSLSPGGGGSGGGGSEVQLVQSGAEVKKPGESLKISCKTSEYSFTSYWIGWVRQMPGKGLEWMGIIYLGDSDTRYSPSFQGQVTISADKSISTAYLQWSSLKASDTAMYYCARSNWGLDYWGQGTLVTVSSASTKGPSVFPLAPSSKSTSGGTAALGCLVKDYFPEPVTVSWNSGALTSGVHTFPAVLQSSGLYSLESVVTVPSSSLGTQTYICNVNHKPSNTKVDKKVEPKSC

SEQ ID NO: 61 - DNA, 660 bp, synthetic construct
  misc_feature 1..660: note = source = /note="Description of Artificial Sequence: Synthetic polynucleotide"
  source 1..660: mol_type = other DNA
gacatccagatgacccagtctccaagctccctgtctgcgtctgtgggcgatagggtcaccatcacttgcaggtccagccagagtgtgttatacagctccaacaataagaactacttagtttggtaccagcagaaaccaggaaaggttcctaaactgctcatttactgggcatctacccgggaatccggggtccctagtcgattcagtggcagcgggtctgggacagatttcactctcaccatcagcagcctgcagcctgaagatgtggcaacttattactgtcagcaatattataagactcctctcactttcggcggagggaccaaggtggagatcaaacgaacggtggctgcaccatctgtcttcatcttcccgccatctgatgagcagttgaaatctggtaccgcctctgttgtgtgcctgctgaataacttctatcccagagaggccaaagtacagtggaaggtggataacgccctccaatcgggtaactcccaggagagtgtcacagagcaggacagcaaggacagcacctacagcctcgagagcaccctgacgctgagcaaagcagactacgagaaacacaaagtctacgcctgcgaagtcacccatcagggcctgagctcgcccgtcacaaagagcttcaacaggggagagtgt

SEQ ID NO: 62 - DNA, 642 bp, synthetic construct; identical to SEQ ID NO: 38
  misc_feature 1..642: note = source = /note="Description of Artificial Sequence: Synthetic polynucleotide"
  source 1..642: mol_type = other DNA

SEQ ID NO: 63 - DNA, 2061 bp, synthetic construct
  misc_feature 1..2061: note = source = /note="Description of Artificial Sequence: Synthetic polynucleotide"
  source 1..2061: mol_type = other DNA
caggtacagttgcaggagtcaggtccaggactggtgaagccctcggagaccctctcactcacctgtaccatctccggggacagtgtctctaccaacagtgttgcttggaactggatcaggcagcccccagggaaaggccttgagtggataggaaggacatactacaggtccaagtggtataatgattatgcagtttctctgaaaagtcgagtaaccatcagcccagacacatccaagaaccagttctccctgaagctgagctctgtgactgccgcggacacggctgtgtattactgtgcaagagaggatggggatagctactaccgctacggtatggacgtctggggccaagggaccacggtcaccgtctcctcagcctccaccaagggcccatcggtcttccccctggcaccctcctccaagagcacctctgggggcacagcggccctgggctgcctggtcaaggactacttccccgaaccggtgacggtgtcgtggaactcaggcgccctgaccagcggcgtgcacaccttcccggctgtcctacagtcctcaggactctactccctcaaaagcgtggtgaccgtgccctccagcagcttgggcacccagacctacatctgcaacgtgaatcacaagcccagcaacaccaaggtggacaagaaagttgagcccaaatcttgtgacaaaactcacacatgcccaccgtgcccagcacctgaactcctggggggaccgtcagtcttcctcttccccccaaaacccaaggacaccctcatgatctcccggacccctgaggtcacatgcgtggtggtggacgtgagccacgaagaccctgaggtcaagttcaactggtacgtggacggcgtggaggtgcataatgccaagacaaagccgtgtgaggagcagtacggcagcacgtaccgttgtgtcagcgtcctcaccgtcctgcaccaggactggctgaatggcaaggagtacaagtgcaaggtctccaacaaagccctcccagcccccatcgagaaaaccatctccaaagccaaagggcagccccgagaaccacaggtgtacaccctgcccccatcccgggaggagatgaccaagaaccaggtcagcctgacctgcctggtcaaaggcttctatcccagcgacatcgccgtggagtgggagagcaatgggcagccggagaacaactacaagaccacgcctcccgtgctggactccgacggctccttcttcctctatagcaagctcaccgtggacaagagcaggtggcagcaggggaacgtcttctcatgctccgtgatgcatgaggctctgcacaaccactacacgcagaagagcctctccctgtctccgggtggtggcggatcgggaggtggcggatccgaggtacaactggtggaatcaggtggaggtttggtgcagccggggagatcgctcaggcttagctgtgcggcatcggggtttactttcgatgattatgcgatgcattgggtccggcaagcgcctggaaaagggctcgagtgggtttccgccattacgtggaatagcggacacatcgattatgcagacagtgtggagggcagattcacaatctcacgagacaatgctaagaacagcctgtaccttcagatgaactcacttcgcgcggaagataccgccgtatactactgcgccaaagtctcctacttgtctacagcttcgtcgctcgactattggggtcaaggaacgttggtcaccgtctctagtgcctccaccaagggcccatcggtcttccccctggcaccctcctccaagagcacctctgggggcacagcggccctgggctgcctggtcaaggactacttccccgaaccggtgacggtgtcgtggaactcaggcgccctgaccagcggcgtgcacaccttcccggctgtcctacagtcctcaggactctactccctcgagagcgtggtgaccgtgccctccagcagcttgggcacccagacctacatctgcaacgtgaatcacaagcccagcaacaccaaggtggacaagaaagttgagcccaaatcttgt

SEQ ID NO: 64 - protein, 220 aa, synthetic construct
  REGION 1..220: note = source = /note="Description of Artificial Sequence: Synthetic polypeptide"
DIQMTQSPSSLSASVGDRVTITCRSSQSVLYSSNNKNYLVWYQQKPGKVPKLLIYWASTRESGVPSRFSGSGSGTDFTLTISSLQPEDVATYYCQQYYKTPLTFGGGTKVEIKRTVAAPSVFIFPPSDEQLKSGTASVVCLLNNFYPREAKVQWKVDNALQSGNSQESVTEQDSKDSTYSLESTLTLSKADYEKHKVYACEVTHQGLSSPVTKSFNRGEC

SEQ ID NO: 65 - protein, 214 aa, synthetic construct; identical to SEQ ID NO: 41
  REGION 1..214: note = source = /note="Description of Artificial Sequence: Synthetic polypeptide"

SEQ ID NO: 66 - protein, 687 aa, synthetic construct
  REGION 1..687: note = source = /note="Description of Artificial Sequence: Synthetic polypeptide"
QVQLQESGPGLVKPSETLSLTCTISGDSVSTNSVAWNWIRQPPGKGLEWIGRTYYRSKWYNDYAVSLKSRVTISPDTSKNQFSLKLSSVTAADTAVYYCAREDGDSYYRYGMDVWGQGTTVTVSSASTKGPSVFPLAPSSKSTSGGTAALGCLVKDYFPEPVTVSWNSGALTSGVHTFPAVLQSSGLYSLKSVVTVPSSSLGTQTYICNVNHKPSNTKVDKKVEPKSCDKTHTCPPCPAPELLGGPSVFLFPPKPKDTLMISRTPEVTCVVVDVSHEDPEVKFNWYVDGVEVHNAKTKPCEEQYGSTYRCVSVLTVLHQDWLNGKEYKCKVSNKALPAPIEKTISKAKGQPREPQVYTLPPSREEMTKNQVSLTCLVKGFYPSDIAVEWESNGQPENNYKTTPPVLDSDGSFFLYSKLTVDKSRWQQGNVFSCSVMHEALHNHYTQKSLSLSPGGGGSGGGGSEVQLVESGGGLVQPGRSLRLSCAASGFTFDDYAMHWVRQAPGKGLEWVSAITWNSGHIDYADSVEGRFTISRDNAKNSLYLQMNSLRAEDTAVYYCAKVSYLSTASSLDYWGQGTLVTVSSASTKGPSVFPLAPSSKSTSGGTAALGCLVKDYFPEPVTVSWNSGALTSGVHTFPAVLQSSGLYSLESVVTVPSSSLGTQTYICNVNHKPSNTKVDKKVEPKSC

SEQ ID NO: 67 - DNA, 660 bp, synthetic construct; identical to SEQ ID NO: 61
  misc_feature 1..660: note = source = /note="Description of Artificial Sequence: Synthetic polynucleotide"
  source 1..660: mol_type = other DNA

SEQ ID NO: 68 - DNA, 651 bp, synthetic construct; identical to SEQ ID NO: 44
  misc_feature 1..651: note = source = /note="Description of Artificial Sequence: Synthetic polynucleotide"
  source 1..651: mol_type = other DNA

SEQ ID NO: 69 - DNA, 2046 bp, synthetic construct
  misc_feature 1..2046: note = source = /note="Description of Artificial Sequence: Synthetic polynucleotide"
  source 1..2046: mol_type = other DNA
caggtacagttgcaggagtcaggtccaggactggtgaagccctcggagaccctctcactcacctgtaccatctccggggacagtgtctctaccaacagtgttgcttggaactggatcaggcagcccccagggaaaggccttgagtggataggaaggacatactacaggtccaagtggtataatgattatgcagtttctctgaaaagtcgagtaaccatcagcccagacacatccaagaaccagttctccctgaagctgagctctgtgactgccgcggacacggctgtgtattactgtgcaagagaggatggggatagctactaccgctacggtatggacgtctggggccaagggaccacggtcaccgtctcctcagcctccaccaagggcccatcggtcttccccctggcaccctcctccaagagcacctctgggggcacagcggccctgggctgcctggtcaaggactacttccccgaaccggtgacggtgtcgtggaactcaggcgccctgaccagcggcgtgcacaccttcccggctgtcctacagtcctcaggactctactccctcaaaagcgtggtgaccgtgccctccagcagcttgggcacccagacctacatctgcaacgtgaatcacaagcccagcaacaccaaggtggacaagaaagttgagcccaaatcttgtgacaaaactcacacatgcccaccgtgcccagcacctgaactcctggggggaccgtcagtcttcctcttccccccaaaacccaaggacaccctcatgatctcccggacccctgaggtcacatgcgtggtggtggacgtgagccacgaagaccctgaggtcaagttcaactggtacgtggacggcgtggaggtgcataatgccaagacaaagccgtgtgaggagcagtacggcagcacgtaccgttgtgtcagcgtcctcaccgtcctgcaccaggactggctgaatggcaaggagtacaagtgcaaggtctccaacaaagccctcccagcccccatcgagaaaaccatctccaaagccaaagggcagccccgagaaccacaggtgtacaccctgcccccatcccgggaggagatgaccaagaaccaggtcagcctgacctgcctggtcaaaggcttctatcccagcgacatcgccgtggagtgggagagcaatgggcagccggagaacaactacaagaccacgcctcccgtgctggactccgacggctccttcttcctctatagcaagctcaccgtggacaagagcaggtggcagcaggggaacgtcttctcatgctccgtgatgcatgaggctctgcacaaccactacacgcagaagagcctctccctgtctccgggtggtggcggatcgggaggtggcggatccgaggtgcagctggtgcagtctggagcagaggtgaaaaagcccggggagtctctgaagatctcctgtaagacttctgaatacagctttaccagctactggatcggctgggtgcgccagatgcccgggaaaggcctggagtggatggggatcatctatcttggtgactcagataccagatacagcccgtccttccaaggccaggtcaccatctcagccgacaagtccatcagtaccgcctacctgcagtggagcagcctgaaggcctcggacaccgccatgtattactgtgcgagaagtaactggggtcttgactactggggccagggaaccctggtcaccgtctctagtgcctccaccaagggcccatcggtcttccccctggcaccctcctccaagagcacctctgggggcacagcggccctgggctgcctggtcaaggactacttccccgaaccggtgacggtgtcgtggaactcaggcgccctgaccagcggcgtgcacaccttcccggctgtcctacagtcctcaggactctactccctcgagagcgtggtgaccgtgccctccagcagcttgggcacccagacctacatctgcaacgtgaatcacaagcccagcaacaccaaggtggacaagaaagttgagcccaaatcttgt

SEQ ID NO: 70 - protein, 220 aa, synthetic construct; identical to SEQ ID NO: 64
  REGION 1..220: note = source = /note="Description of Artificial Sequence: Synthetic polypeptide"

SEQ ID NO: 71 - protein, 217 aa, synthetic construct; identical to SEQ ID NO: 47
  REGION 1..217: note = source = /note="Description of Artificial Sequence: Synthetic polypeptide"

SEQ ID NO: 72 - protein, 682 aa, synthetic construct
  REGION 1..682: note = source = /note="Description of Artificial Sequence: Synthetic polypeptide"
QVQLQESGPGLVKPSETLSLTCTISGDSVSTNSVAWNWIRQPPGKGLEWIGRTYYRSKWYNDYAVSLKSRVTISPDTSKNQFSLKLSSVTAADTAVYYCAREDGDSYYRYGMDVWGQGTTVTVSSASTKGPSVFPLAPSSKSTSGGTAALGCLVKDYFPEPVTVSWNSGALTSGVHTFPAVLQSSGLYSLKSVVTVPSSSLGTQTYICNVNHKPSNTKVDKKVEPKSCDKTHTCPPCPAPELLGGPSVFLFPPKPKDTLMISRTPEVTCVVVDVSHEDPEVKFNWYVDGVEVHNAKTKPCEEQYGSTYRCVSVLTVLHQDWLNGKEYKCKVSNKALPAPIEKTISKAKGQPREPQVYTLPPSREEMTKNQVSLTCLVKGFYPSDIAVEWESNGQPENNYKTTPPVLDSDGSFFLYSKLTVDKSRWQQGNVFSCSVMHEALHNHYTQKSLSLSPGGGGSGGGGSEVQLVQSGAEVKKPGESLKISCKTSEYSFTSYWIGWVRQMPGKGLEWMGIIYLGDSDTRYSPSFQGQVTISADKSISTAYLQWSSLKASDTAMYYCARSNWGLDYWGQGTLVTVSSASTKGPSVFPLAPSSKSTSGGTAALGCLVKDYFPEPVTVSWNSGALTSGVHTFPAVLQSSGLYSLESVVTVPSSSLGTQTYICNVNHKPSNTKVDKKVEPKSC

SEQ ID NO: 73 - DNA, 642 bp, synthetic construct; identical to SEQ ID NO: 2
  misc_feature 1..642: note = source = /note="Description of Artificial Sequence: Synthetic polynucleotide"
  source 1..642: mol_type = other DNA

SEQ ID NO: 74 - DNA, 2055 bp, synthetic construct
  misc_feature 1..2055: note = source = /note="Description of Artificial Sequence: Synthetic polynucleotide"
  source 1..2055: mol_type = other DNA
gaggtacaactggtggaatcaggtggaggtttggtgcagccggggagatcgctcaggcttagctgtgcggcatcggggtttactttcgatgattatgcgatgcattgggtccggcaagcgcctggaaaagggctcgagtgggtttccgccattacgtggaatagcggacacatcgattatgcagacagtgtggagggcagattcacaatctcacgagacaatgctaagaacagcctgtaccttcagatgaactcacttcgcgcggaagataccgccgtatactactgcgccaaagtctcctacttgtctacagcttcgtcgctcgactattggggtcaaggaacgttggtcaccgtctctagtacggtggctgcaccatctgtcttcatcttcccgccatctgatgagcagttgaaatctggaactgcctctgttgtgtgcctgctgaataacttctatcccagagaggccaaagtacagtggaaggtggataacgccctccaatcgggtaactcccaggagagtgtcacagagcaggacagcaaggacagcacctacagcctcaagagcaccctgacgctgagcaaagcagactacgagaaacacaaagtctacgcctgcgaagtcacccatcagggcctgagctcgcccgtcacaaagagcttcaacaggggagagtgtgacaaaactcacacatgcccaccgtgcccagcacctgaactcctggggggaccgtcagtcttcctcttccccccaaaacccaaggacaccctcatgatctcccggacccctgaggtcacatgcgtggtggtggacgtgagccacgaagaccctgaggtcaagttcaactggtacgtggacggcgtggaggtgcataatgccaagacaaagccgtgtgaggagcagtacggcagcacgtaccgttgtgtcagcgtcctcaccgtcctgcaccaggactggctgaatggcaaggagtacaagtgcaaggtctccaacaaagccctcccagcccccatcgagaaaaccatctccaaagccaaagggcagccccgagaaccacaggtgtacaccctgcccccatcccgggaggagatgaccaagaaccaggtcagcctgacctgcctggtcaaaggcttctatcccagcgacatcgccgtggagtgggagagcaatgggcagccggagaacaactacaagaccacgcctcccgtgctggactccgacggctccttcttcctctatagcaagctcaccgtggacaagagcaggtggcagcaggggaacgtcttctcatgctccgtgatgcatgaggctctgcacaaccactacacgcagaagagcctctccctgtctccgggtggtggcggatcgggaggtggcggatcccaggtgcagttacagcagtcgggcgcaggactgttgaagccttcggagaccctgtccctcacctgcgctgtccatggtgggtccttcagtggttactactggaactggattcgccagccaccagggaaggggctagagtggattggggaaatcaatcatgctggaaacaccaactacaacccgtccctcaagagtcgagtcaccatatcattagacacgtccaagaaccagttctccctgacgctgacctctgtgaccgccgcggacacggctgtgtattactgtgcgagaggatattgtagaagtaccacctgctactttgactactggggccagggaaccctagtcaccgtctcctcagcctccaccaagggcccatcggtcttccccctggcaccctcctccaagagcacctctgggggcacagcggccctgggctgcctggtcaaggactacttccccgaaccggtgacggtgtcgtggaactcaggcgccctgaccagcggcgtgcacaccttcccggctgtcctacagtcctcaggactctactccctcgagagcgtggtgaccgtgccctccagcagcttgggcacccagacctacatctgcaacgtgaatcacaagcccagcaacaccaaggtggacaagaaagttgagcccaaatcttgt

SEQ ID NO: 75 - DNA, 633 bp, synthetic construct
  misc_feature 1..633: note = source = /note="Description of Artificial Sequence: Synthetic polynucleotide"
  source 1..633: mol_type = other DNA
gatatccaaatgacacaatcaccatcgtcgctttcagcgtctgttggcgaccgtgtgacgattacctgtcgcgcgtcccagggaatccggaattacctcgcatggtatcagcaaaaacccggaaaagcaccgaagctcctgatctatgccgcctcgactcttcagagtggtgtgccgtcgaggtttagcgggtccgggtcaggtacggactttactctcacaatttccagcctgcagcccgaagatgtagctacctattactgccagagatacaaccgagcgccttacacattcggacaagggacaaaagtcgagatcaagcgtgcctccaccaagggcccatcggtcttccccctggcaccctcctccaagagcacctctgggggcacagcggccctgggctgcctggtcaaggactacttccccgaaccggtgacggtgtcgtggaactcaggcgccctgaccagcggcgtgcacaccttcccggctgtcctacagtcctcaggactctactccctcgaaagcgtggtgaccgtgccctccagcagcttgggcacccagacctacatctgcaacgtgaatcacaagcccagcaacaccaaggtggacaagaaagttgagcccaaatcttgt

SEQ ID NO: 76 - protein, 214 aa, synthetic construct; identical to SEQ ID NO: 5
  REGION 1..214: note = source = /note="Description of Artificial Sequence: Synthetic polypeptide"

SEQ ID NO: 77 - protein, 685 aa, synthetic construct
  REGION 1..685: note = source = /note="Description of Artificial Sequence: Synthetic polypeptide"
EVQLVESGGGLVQPGRSLRLSCAASGFTFDDYAMHWVRQAPGKGLEWVSAITWNSGHIDYADSVEGRFTISRDNAKNSLYLQMNSLRAEDTAVYYCAKVSYLSTASSLDYWGQGTLVTVSSTVAAPSVFIFPPSDEQLKSGTASVVCLLNNFYPREAKVQWKVDNALQSGNSQESVTEQDSKDSTYSLKSTLTLSKADYEKHKVYACEVTHQGLSSPVTKSFNRGECDKTHTCPPCPAPELLGGPSVFLFPPKPKDTLMISRTPEVTCVVVDVSHEDPEVKFNWYVDGVEVHNAKTKPCEEQYGSTYRCVSVLTVLHQDWLNGKEYKCKVSNKALPAPIEKTISKAKGQPREPQVYTLPPSREEMTKNQVSLTCLVKGFYPSDIAVEWESNGQPENNYKTTPPVLDSDGSFFLYSKLTVDKSRWQQGNVFSCSVMHEALHNHYTQKSLSLSPGGGGSGGGGSQVQLQQSGAGLLKPSETLSLTCAVHGGSFSGYYWNWIRQPPGKGLEWIGEINHAGNTNYNPSLKSRVTISLDTSKNQFSLTLTSVTAADTAVYYCARGYCRSTTCYFDYWGQGTLVTVSSASTKGPSVFPLAPSSKSTSGGTAALGCLVKDYFPEPVTVSWNSGALTSGVHTFPAVLQSSGLYSLESVVTVPSSSLGTQTYICNVNHKPSNTKVDKKVEPKSC

SEQ ID NO: 78 - protein, 211 aa, synthetic construct
  REGION 1..211: note = source = /note="Description of Artificial Sequence: Synthetic polypeptide"
DIQMTQSPSSLSASVGDRVTITCRASQGIRNYLAWYQQKPGKAPKLLIYAASTLQSGVPSRFSGSGSGTDFTLTISSLQPEDVATYYCQRYNRAPYTFGQGTKVEIKRASTKGPSVFPLAPSSKSTSGGTAALGCLVKDYFPEPVTVSWNSGALTSGVHTFPAVLQSSGLYSLESVVTVPSSSLGTQTYICNVNHKPSNTKVDKKVEPKSC

SEQ ID NO: 79 - DNA, 642 bp, synthetic construct; identical to SEQ ID NO: 8
  misc_feature 1..642: note = source = /note="Description of Artificial Sequence: Synthetic polynucleotide"
  source 1..642: mol_type = other DNA

SEQ ID NO: 80 - DNA, 2049 bp, synthetic construct
  misc_feature 1..2049: note = source = /note="Description of Artificial Sequence: Synthetic polynucleotide"
  source 1..2049: mol_type = other DNA
gaggtacaactggtggaatcaggtggaggtttggtgcagccggggagatcgctcaggcttagctgtgcggcatcggggtttactttcgatgattatgcgatgcattgggtccggcaagcgcctggaaaagggctcgagtgggtttccgccattacgtggaatagcggacacatcgattatgcagacagtgtggagggcagattcacaatctcacgagacaatgctaagaacagcctgtaccttcagatgaactcacttcgcgcggaagataccgccgtatactactgcgccaaagtctcctacttgtctacagcttcgtcgctcgactattggggtcaaggaacgttggtcaccgtctctagtacggtggctgcaccatctgtcttcatcttcccgccatctgatgagcagttgaaatctggaactgcctctgttgtgtgcctgctgaataacttctatcccagagaggccaaagtacagtggaaggtggataacgccctccaatcgggtaactcccaggagagtgtcacagagcaggacagcaaggacagcacctacagcctcaagagcaccctgacgctgagcaaagcagactacgagaaacacaaagtctacgcctgcgaagtcacccatcagggcctgagctcgcccgtcacaaagagcttcaacaggggagagtgtgacaaaactcacacatgcccaccgtgcccagcacctgaactcctggggggaccgtcagtcttcctcttccccccaaaacccaaggacaccctcatgatctcccggacccctgaggtcacatgcgtggtggtggacgtgagccacgaagaccctgaggtcaagttcaactggtacgtggacggcgtggaggtgcataatgccaagacaaagccgtgtgaggagcagtacggcagcacgtaccgttgtgtcagcgtcctcaccgtcctgcaccaggactggctgaatggcaaggagtacaagtgcaaggtctccaacaaagccctcccagcccccatcgagaaaaccatctccaaagccaaagggcagccccgagaaccacaggtgtacaccctgcccccatcccgggaggagatgaccaagaaccaggtcagcctgacctgcctggtcaaaggcttctatcccagcgacatcgccgtggagtgggagagcaatgggcagccggagaacaactacaagaccacgcctcccgtgctggactccgacggctccttcttcctctatagcaagctcaccgtggacaagagcaggtggcagcaggggaacgtcttctcatgctccgtgatgcatgaggctctgcacaaccactacacgcagaagagcctctccctgtctccgggtggtggcggatcgggaggtggcggatcccaggtgcagctgcaggagtcgggcccaggactggtgaagccttcggagaccctgtccctcacctgcactgtctctggtggctccatcagtagttacttctggagctggattcggcagcccccaggtaagggactggagtggattggctatatctattacagtgggcagaccaaatacaacccctccctcaagagtcgagtcaccatatcaatagacacgtccaagaaccagttctccctgaagctgagctctgtgaccgctgcggacacggccgtgtattactgtgcgagagaaactgggagctactacggctttgactactggggccagggaaccctggtcaccgtctcctcagcctccaccaagggcccatcggtcttccccctggcaccctcctccaagagcacctctgggggcacagcggccctgggctgcctggtcaaggactacttccccgaaccggtgacggtgtcgtggaactcaggcgccctgaccagcggcgtgcacaccttcccggctgtcctacagtcctcaggactctactccctcgagagcgtggtgaccgtgccctccagcagcttgggcacccagacctacatctgcaacgtgaatcacaagcccagcaacaccaaggtggacaagaaagttgagcccaaatcttgt

SEQ ID NO: 81 - DNA, 633 bp, synthetic construct; identical to SEQ ID NO: 75
  misc_feature 1..633: note = source = /note="Description of Artificial Sequence: Synthetic polynucleotide"
  source 1..633: mol_type = other DNA

SEQ ID NO: 82 - protein, 214 aa, synthetic construct; identical to SEQ ID NO: 11
  REGION 1..214: note = source = /note="Description of Artificial Sequence: Synthetic polypeptide"

SEQ ID NO: 83 - protein, 683 aa, synthetic construct
  REGION 1..683: note = source = /note="Description of Artificial Sequence: Synthetic polypeptide"
EVQLVESGGGLVQPGRSLRLSCAASGFTFDDYAMHWVRQAPGKGLEWVSAITWNSGHIDYADSVEGRFTISRDNAKNSLYLQMNSLRAEDTAVYYCAKVSYLSTASSLDYWGQGTLVTVSSTVAAPSVFIFPPSDEQLKSGTASVVCLLNNFYPREAKVQWKVDNALQSGNSQESVTEQDSKDSTYSLKSTLTLSKADYEKHKVYACEVTHQGLSSPVTKSFNRGECDKTHTCPPCPAPELLGGPSVFLFPPKPKDTLMISRTPEVTCVVVDVSHEDPEVKFNWYVDGVEVHNAKTKPCEEQYGSTYRCVSVLTVLHQDWLNGKEYKCKVSNKALPAPIEKTISKAKGQPREPQVYTLPPSREEMTKNQVSLTCLVKGFYPSDIAVEWESNGQPENNYKTTPPVLDSDGSFFLYSKLTVDKSRWQQGNVFSCSVMHEALHNHYTQKSLSLSPGGGGSGGGGSQVQLQESGPGLVKPSETLSLTCTVSGGSISSYFWSWIRQPPGKGLEWIGYIYYSGQTKYNPSLKSRVTISIDTSKNQFSLKLSSVTAADTAVYYCARETGSYYGFDYWGQGTLVTVSSASTKGPSVFPLAPSSKSTSGGTAALGCLVKDYFPEPVTVSWNSGALTSGVHTFPAVLQSSGLYSLESVVTVPSSSLGTQTYICNVNHKPSNTKVDKKVEPKSC

SEQ ID NO: 84 - protein, 211 aa, synthetic construct; identical to SEQ ID NO: 78
  REGION 1..211: note = source = /note="Description of Artificial Sequence: Synthetic polypeptide"

SEQ ID NO: 85 - DNA, 660 bp, synthetic construct; identical to SEQ ID NO: 14
  misc_feature 1..660: note = source = /note="Description of Artificial Sequence: Synthetic polynucleotide"
  source 1..660: mol_type = other DNA

SEQ ID NO: 86 - DNA, 2070 bp, synthetic construct
  misc_feature 1..2070: note = source = /note="Description of Artificial Sequence: Synthetic polynucleotide"
  source 1..2070: mol_type = other DNA
gaggtacaactggtggaatcaggtggaggtttggtgcagccggggagatcgctcaggcttagctgtgcggcatcggggtttactttcgatgattatgcgatgcattgggtccggcaagcgcctggaaaagggctcgagtgggtttccgccattacgtggaatagcggacacatcgattatgcagacagtgtggagggcagattcacaatctcacgagacaatgctaagaacagcctgtaccttcagatgaactcacttcgcgcggaagataccgccgtatactactgcgccaaagtctcctacttgtctacagcttcgtcgctcgactattggggtcaaggaacgttggtcaccgtctctagtacggtggctgcaccatctgtcttcatcttcccgccatctgatgagcagttgaaatctggaactgcctctgttgtgtgcctgctgaataacttctatcccagagaggccaaagtacagtggaaggtggataacgccctccaatcgggtaactcccaggagagtgtcacagagcaggacagcaaggacagcacctacagcctcaagagcaccctgacgctgagcaaagcagactacgagaaacacaaagtctacgcctgcgaagtcacccatcagggcctgagctcgcccgtcacaaagagcttcaacaggggagagtgtgacaaaactcacacatgcccaccgtgcccagcacctgaactcctggggggaccgtcagtcttcctcttccccccaaaacccaaggacaccctcatgatctcccggacccctgaggtcacatgcgtggtggtggacgtgagccacgaagaccctgaggtcaagttcaactggtacgtggacggcgtggaggtgcataatgccaagacaaagccgtgtgaggagcagtacggcagcacgtaccgttgtgtcagcgtcctcaccgtcctgcaccaggactggctgaatggcaaggagtacaagtgcaaggtctccaacaaagccctcccagcccccatcgagaaaaccatctccaaagccaaagggcagccccgagaaccacaggtgtacaccctgcccccatcccgggaggagatgaccaagaaccaggtcagcctgacctgcctggtcaaaggcttctatcccagcgacatcgccgtggagtgggagagcaatgggcagccggagaacaactacaagaccacgcctcccgtgctggactccgacggctccttcttcctctatagcaagctcaccgtggacaagagcaggtggcagcaggggaacgtcttctcatgctccgtgatgcatgaggctctgcacaaccactacacgcagaagagcctctccctgtctccgggtggtggcggatcgggaggtggcggatcccaggtacagttgcaggagtcaggtccaggactggtgaagccctcggagaccctctcactcacctgtaccatctccggggacagtgtctctaccaacagtgttgcttggaactggattaggcagcccccagggaaaggccttgagtggataggaaggacatactacaggtccaagtggtataatgattatgcagtttctctgaaaagtcgagtaaccatcagcccagacacatccaagaaccagttctccctgaagctgagctctgtgactgccgcggacacggctgtgtattactgtgcaagagaggatggggatagctactaccgctacggtatggacgtctggggccaagggaccacggtcaccgtctcctcagcctccaccaagggcccatcggtcttccccctggcaccctcctccaagagcacctctgggggcacagcggccctgggctgcctggtcaaggactacttccccgaaccggtgacggtgtcgtggaactcaggcgccctgaccagcggcgtgcacaccttcccggctgtcctacagtcctcaggactctactccctcgagagcgtggtgaccgtgccctccagcagcttgggcacccagacctacatctgcaacgtgaatcacaagcccagcaacaccaaggtggacaagaaagttgagcccaaatcttgt

SEQ ID NO: 87 - DNA, 633 bp, synthetic construct; identical to SEQ ID NO: 75
  misc_feature 1..633: note = source = /note="Description of Artificial Sequence: Synthetic polynucleotide"
  source 1..633: mol_type = other DNA

SEQ ID NO: 88 - protein, 220 aa, synthetic construct; identical to SEQ ID NO: 17
  REGION 1..220: note = source = /note="Description of Artificial Sequence: Synthetic polypeptide"

SEQ ID NO: 89 - protein, 690 aa, synthetic construct
  REGION 1..690: note = source = /note="Description of Artificial Sequence: Synthetic polypeptide"
EVQLVESGGGLVQPGRSLRLSCAASGFTFDDYAMHWVRQAPGKGLEWVSAITWNSGHIDYADSVEGRFTISRDNAKNSLYLQMNSLRAEDTAVYYCAKVSYLSTASSLDYWGQGTLVTVSSTVAAPSVFIFPPSDEQLKSGTASVVCLLNNFYPREAKVQWKVDNALQSGNSQESVTEQDSKDSTYSLKSTLTLSKADYEKHKVYACEVTHQGLSSPVTKSFNRGECDKTHTCPPCPAPELLGGPSVFLFPPKPKDTLMISRTPEVTCVVVDVSHEDPEVKFNWYVDGVEVHNAKTKPCEEQYGSTYRCVSVLTVLHQDWLNGKEYKCKVSNKALPAPIEKTISKAKGQPREPQVYTLPPSREEMTKNQVSLTCLVKGFYPSDIAVEWESNGQPENNYKTTPPVLDSDGSFFLYSKLTVDKSRWQQGNVFSCSVMHEALHNHYTQKSLSLSPGGGGSGGGGSQVQLQESGPGLVKPSETLSLTCTISGDSVSTNSVAWNWIRQPPGKGLEWIGRTYYRSKWYNDYAVSLKSRVTISPDTSKNQFSLKLSSVTAADTAVYYCAREDGDSYYRYGMDVWGQGTTVTVSSASTKGPSVFPLAPSSKSTSGGTAALGCLVKDYFPEPVTVSWNSGALTSGVHTFPAVLQSSGLYSLESVVTVPSSSLGTQTYICNVNHKPSNTKVDKKVEPKSC

SEQ ID NO: 90 - protein, 211 aa, synthetic construct; identical to SEQ ID NO: 78
  REGION 1..211: note = source = /note="Description of Artificial Sequence: Synthetic polypeptide"

SEQ ID NO: 91 - DNA, 642 bp, synthetic construct; identical to SEQ ID NO: 2
  misc_feature 1..642: note = source = /note="Description of Artificial Sequence: Synthetic polynucleotide"
  source 1..642: mol_type = other DNA

SEQ ID NO: 92 - DNA, 2037 bp, synthetic construct
  misc_feature 1..2037: note = source = /note="Description of Artificial Sequence: Synthetic polynucleotide"
  source 1..2037: mol_type = other DNA
gaggtgcagctggtgcagtctggagcagaggtgaaaaagcccggggagtctctgaagatctcctgtaagacttctgaatacagctttaccagctactggatcggctgggtgcgccagatgcccgggaaaggcctggagtggatggggatcatctatcttggtgactcagataccagatacagcccgtccttccaaggccaggtcaccatctcagccgacaagtccatcagtaccgcctacctgcagtggagcagcctgaaggcctcggacaccgccatgtattactgtgcgagaagtaactggggtcttgactactggggccagggaaccctggtcaccgtctctagtcagcccaaggccaaccccactgtcactctgttcccgccctcctctgaggagctccaagccaacaaggccacactagtgtgtctgatcagtgacttctacccgggagctgtgacagtggcctggaaggcagatggcagccccgtcaaggcgggagtggagaccaccaaaccctccaaacagagcaacaacaagtacgcggccaagagctacctgagcctgacgcccgagcagtggaagtcccacagaagctacagctgccaggtcacgcatgaagggagcaccgtggagaagacagtggcccctacagaatgttcagacaaaactcacacatgcccaccgtgcccagcacctgaactcctggggggaccgtcagtcttcctcttccccccaaaacccaaggacaccctcatgatctcccggacccctgaggtcacatgcgtggtggtggacgtgagccacgaagaccctgaggtcaagttcaactggtacgtggacggcgtggaggtgcataatgccaagacaaagccgtgtgaggagcagtacggcagcacgtaccgttgtgtcagcgtcctcaccgtcctgcaccaggactggctgaatggcaaggagtacaagtgcaaggtctccaacaaagccctcccagcccccatcgagaaaaccatctccaaagccaaagggcagccccgagaaccacaggtgtacaccctgcccccatcccgggaggagatgaccaagaaccaggtcagcctgacctgcctggtcaaaggcttctatcccagcgacatcgccgtggagtgggagagcaatgggcagccggagaacaactacaagaccacgcctcccgtgctggactccgacggctccttcttcctctatagcaagctcaccgtggacaagagcaggtggcagcaggggaacgtcttctcatgctccgtgatgcatgaggctctgcacaaccactacacgcagaagagcctctccctgtctccgggtggtggcggatcgggaggtggcggatcccaggtgcagttacagcagtcgggcgcaggactgttgaagccttcggagaccctgtccctcacctgcgctgtccatggtgggtccttcagtggttactactggaactggattcgccagccaccagggaaggggctagagtggattggggaaatcaatcatgctggaaacaccaactacaacccgtccctcaagagtcgagtcaccatatcattagacacgtccaagaaccagttctccctgacgctgacctctgtgaccgccgcggacacggctgtgtattactgtgcgagaggatattgtagaagtaccacctgctactttgactactggggccagggaaccctagtcaccgtctcctcagcctccaccaagggcccatcggtcttccccctggcaccctcctccaagagcacctctgggggcacagcggccctgggctgcctggtcaaggactacttccccgaaccggtgacggtgtcgtggaactcaggcgccctgaccagcggcgtgcacaccttcccggctgtcctacagtcctcaggactctactccctcgagagcgtggtgaccgtgccctccagcagcttgggcacccagacctacatctgcaacgtgaatcacaagcccagcaacaccaaggtggacaagaaagttgagcccaaatcttgt

SEQ ID NO: 93 - DNA, 645 bp, synthetic construct
  misc_feature 1..645: note = source = /note="Description of Artificial Sequence: Synthetic polynucleotide"
  source 1..645: mol_type = other DNA
cagtctgtgctgacgcagccgccctcagtgtctggggccccagggcagagggtcaccatctcctgcactgggagcagttccaacatcggggcaggttatgatgtacactggtaccagcagtttccaggaacagcccccaaactcctcatccaaggtaacagcaatcggccctcaggggtccctgaccgattctctggctccaagtctggcacctcagcctccctggccatcactgggctccaggctgaggatgaggctgattattactgccagtcctatgacagcagcctgagtggttcggtgttcggcggagggaccaagctgaccgtcctaggtgcctccaccaagggcccatcggtcttccccctggcaccctcctccaagagcacctctgggggcacagcggccctgggctgcctggtcaaggactacttccccgaaccggtgacggtgtcgtggaactcaggcgccctgaccagcggcgtgcacaccttcccggctgtcctacagtcctcaggactctactccctcgaaagcgtggtgaccgtgccctccagcagcttgggcacccagacctacatctgcaacgtgaatcacaagcccagcaacaccaaggtggacaagaaagttgagcccaaatcttgt

SEQ ID NO: 94 - protein, 214 aa, synthetic construct; identical to SEQ ID NO: 5
  REGION 1..214: note = source = /note="Description of Artificial Sequence: Synthetic polypeptide"

SEQ ID NO: 95 - protein, 679 aa, synthetic construct
  REGION 1..679: note = source = /note="Description of Artificial Sequence: Synthetic polypeptide"
EVQLVQSGAEVKKPGESLKISCKTSEYSFTSYWIGWVRQMPGKGLEWMGIIYLGDSDTRYSPSFQGQVTISADKSISTAYLQWSSLKASDTAMYYCARSNWGLDYWGQGTLVTVSSQPKANPTVTLFPPSSEELQANKATLVCLISDFYPGAVTVAWKADGSPVKAGVETTKPSKQSNNKYAAKSYLSLTPEQWKSHRSYSCQVTHEGSTVEKTVAPTECSDKTHTCPPCPAPELLGGPSVFLFPPKPKDTLMISRTPEVTCVVVDVSHEDPEVKFNWYVDGVEVHNAKTKPCEEQYGSTYRCVSVLTVLHQDWLNGKEYKCKVSNKALPAPIEKTISKAKGQPREPQVYTLPPSREEMTKNQVSLTCLVKGFYPSDIAVEWESNGQPENNYKTTPPVLDSDGSFFLYSKLTVDKSRWQQGNVFSCSVMHEALHNHYTQKSLSLSPGGGGSGGGGSQVQLQQSGAGLLKPSETLSLTCAVHGGSFSGYYWNWIRQPPGKGLEWIGEINHAGNTNYNPSLKSRVTISLDTSKNQFSLTLTSVTAADTAVYYCARGYCRSTTCYFDYWGQGTLVTVSSASTKGPSVFPLAPSSKSTSGGTAALGCLVKDYFPEPVTVSWNSGALTSGVHTFPAVLQSSGLYSLESVVTVPSSSLGTQTYICNVNHKPSNTKVDKKVEPKSC

SEQ ID NO: 96 - protein, 215 aa, synthetic construct
  REGION 1..215: note = source = /note="Description of Artificial Sequence: Synthetic polypeptide"
QSVLTQPPSVSGAPGQRVTISCTGSSSNIGAGYDVHWYQQFPGTAPKLLIQGNSNRPSGVPDRFSGSKSGTSASLAITGLQAEDEADYYCQSYDSSLSGSVFGGGTKLTVLGASTKGPSVFPLAPSSKSTSGGTAALGCLVKDYFPEPVTVSWNSGALTSGVHTFPAVLQSSGLYSLESVVTVPSSSLGTQTYICNVNHKPSNTKVDKKVEPKSC

SEQ ID NO: 97 - DNA, 642 bp, synthetic construct; identical to SEQ ID NO: 8
  misc_feature 1..642: note = source = /note="Description of Artificial Sequence: Synthetic polynucleotide"
  source 1..642: mol_type = other DNA

SEQ ID NO: 98 - DNA, 2031 bp, synthetic construct
  misc_feature 1..2031: note = source = /note="Description of Artificial Sequence: Synthetic polynucleotide"
  source 1..2031: mol_type = other DNA
gaggtgcagctggtgcagtctggagcagaggtgaaaaagcccggggagtctctgaagatctcctgtaagacttctgaatacagctttaccagctactggatcggctgggtgcgccagatgcccgggaaaggcctggagtggatggggatcatctatcttggtgactcagataccagatacagcccgtccttccaaggccaggtcaccatctcagccgacaagtccatcagtaccgcctacctgcagtggagcagcctgaaggcctcggacaccgccatgtattactgtgcgagaagtaactggggtcttgactactggggccagggaaccctggtcaccgtctctagtcagcccaaggccaaccccactgtcactctgttcccgccctcctctgaggagctccaagccaacaaggccacactagtgtgtctgatcagtgacttctacccgggagctgtgacagtggcctggaaggcagatggcagccccgtcaaggcgggagtggagaccaccaaaccctccaaacagagcaacaacaagtacgcggccaagagctacctgagcctgacgcccgagcagtggaagtcccacagaagctacagctgccaggtcacgcatgaagggagcaccgtggagaagacagtggcccctacagaatgttcagacaaaactcacacatgcccaccgtgcccagcacctgaactcctggggggaccgtcagtcttcctcttccccccaaaacccaaggacaccctcatgatctcccggacccctgaggtcacatgcgtggtggtggacgtgagccacgaagaccctgaggtcaagttcaactggtacgtggacggcgtggaggtgcataatgccaagacaaagccgtgtgaggagcagtacggcagcacgtaccgttgtgtcagcgtcctcaccgtcctgcaccaggactggctgaatggcaaggagtacaagtgcaaggtctccaacaaagccctcccagcccccatcgagaaaaccatctccaaagccaaagggcagccccgagaaccacaggtgtacaccctgcccccatcccgggaggagatgaccaagaaccaggtcagcctgacctgcctggtcaaaggcttctatcccagcgacatcgccgtggagtgggagagcaatgggcagccggagaacaactacaagaccacgcctcccgtgctggactccgacggctccttcttcctctatagcaagctcaccgtggacaagagcaggtggcagcaggggaacgtcttctcatgctccgtgatgcatgaggctctgcacaaccactacacgcagaagagcctctccctgtctccgggtggtggcggatcgggaggtggcggatcccaggtgcagctgcaggagtcgggcccaggactggtgaagccttcggagaccctgtccctcacctgcactgtctctggtggctccatcagtagttacttctggagctggattcggcagcccccaggtaagggactggagtggattggctatatctattacagtgggcagaccaaatacaacccctccctcaagagtcgagtcaccatatcaatagacacgtccaagaaccagttctccctgaagctgagctctgtgaccgctgcggacacggccgtgtattactgtgcgagagaaactgggagctactacggctttgactactggggccagggaaccctggtcaccgtctcctcagcctccaccaagggcccatcggtcttccccctggcaccctcctccaagagcacctctgggggcacagcggccctgggctgcctggtcaaggactacttccccgaaccggtgacggtgtcgtggaactcaggcgccctgaccagcggcgtgcacaccttcccggctgtcctacagtcctcaggactctactccctcgagagcgtggtgaccgtgccctccagcagcttgggcacccagacctacatctgcaacgtgaatcacaagcccagcaacaccaaggtggacaagaaagttgagcccaaatcttgt

SEQ ID NO: 99 - DNA, 645 bp, synthetic construct; identical to SEQ ID NO: 93
  misc_feature 1..645: note = source = /note="Description of Artificial Sequence: Synthetic polynucleotide"
  source 1..645: mol_type = other DNA

SEQ ID NO: 100 - protein, 214 aa, synthetic construct; identical to SEQ ID NO: 11
  REGION 1..214: note = source = /note="Description of Artificial Sequence: Synthetic polypeptide"

SEQ ID NO: 101 - protein, 677 aa, synthetic construct
  REGION 1..677: note = source = /note="Description of Artificial Sequence: Synthetic polypeptide"
EVQLVQSGAEVKKPGESLKISCKTSEYSFTSYWIGWVRQMPGKGLEWMGIIYLGDSDTRYSPSFQGQVTISADKSISTAYLQWSSLKASDTAMYYCARSNWGLDYWGQGTLVTVSSQPKANPTVTLFPPSSEELQANKATLVCLISDFYPGAVTVAWKADGSPVKAGVETTKPSKQSNNKYAAKSYLSLTPEQWKSHRSYSCQVTHEGSTVEKTVAPTECSDKTHTCPPCPAPELLGGPSVFLFPPKPKDTLMISRTPEVTCVVVDVSHEDPEVKFNWYVDGVEVHNAKTKPCEEQYGSTYRCVSVLTVLHQDWLNGKEYKCKVSNKALPAPIEKTISKAKGQPREPQVYTLPPSREEMTKNQVSLTCLVKGFYPSDIAVEWESNGQPENNYKTTPPVLDSDGSFFLYSKLTVDKSRWQQGNVFSCSVMHEALHNHYTQKSLSLSPGGGGSGGGGSQVQLQESGPGLVKPSETLSLTCTVSGGSISSYFWSWIRQPPGKGLEWIGYIYYSGQTKYNPSLKSRVTISIDTSKNQFSLKLSSVTAADTAVYYCARETGSYYGFDYWGQGTLVTVSSASTKGPSVFPLAPSSKSTSGGTAALGCLVKDYFPEPVTVSWNSGALTSGVHTFPAVLQSSGLYSLESVVTVPSSSLGTQTYICNVNHKPSNTKVDKKVEPKSC

SEQ ID NO: 102 - protein, 215 aa, synthetic construct; identical to SEQ ID NO: 96
  REGION 1..215: note = source = /note="Description of Artificial Sequence: Synthetic polypeptide"

SEQ ID NO: 103 - DNA, 660 bp, synthetic construct; identical to SEQ ID NO: 14
  misc_feature 1..660: note = source = /note="Description of Artificial Sequence: Synthetic polynucleotide"
  source 1..660: mol_type = other DNA

SEQ ID NO: 104 - DNA, 2052 bp, synthetic construct
  misc_feature 1..2052: note = source = /note="Description of Artificial Sequence: Synthetic polynucleotide"
  source 1..2052: mol_type = other DNA
gaggtgcagctggtgcagtctggagcagaggtgaaaaagcccggggagtctctgaagatctcctgtaagacttctgaatacagctttaccagctactggatcggctgggtgcgccagatgcccgggaaaggcctggagtggatggggatcatctatcttggtgactcagataccagatacagcccgtccttccaaggccaggtcaccatctcagccgacaagtccatcagtaccgcctacctgcagtggagcagcctgaaggcctcggacaccgccatgtattactgtgcgagaagtaactggggtcttgactactggggccagggaaccctggtcaccgtctctagtcagcccaaggccaaccccactgtcactctgttcccgccctcctctgaggagctccaagccaacaaggccacactagtgtgtctgatcagtgacttctacccgggagctgtgacagtggcctggaaggcagatggcagccccgtcaaggcgggagtggagaccaccaaaccctccaaacagagcaacaacaagtacgcggccaagagctacctgagcctgacgcccgagcagtggaagtcccacagaagctacagctgccaggtcacgcatgaagggagcaccgtggagaagacagtggcccctacagaatgttcagacaaaactcacacatgcccaccgtgcccagcacctgaactcctggggggaccgtcagtcttcctcttccccccaaaacccaaggacaccctcatgatctcccggacccctgaggtcacatgcgtggtggtggacgtgagccacgaagaccctgaggtcaagttcaactggtacgtggacggcgtggaggtgcataatgccaagacaaagccgtgtgaggagcagtacggcagcacgtaccgttgtgtcagcgtcctcaccgtcctgcaccaggactggctgaatggcaaggagtacaagtgcaaggtctccaacaaagccctcccagcccccatcgagaaaaccatctccaaagccaaagggcagccccgagaaccacaggtgtacaccctgcccccatcccgggaggagatgaccaagaaccaggtcagcctgacctgcctggtcaaaggcttctatcccagcgacatcgccgtggagtgggagagcaatgggcagccggagaacaactacaagaccacgcctcccgtgctggactccgacggctccttcttcctctatagcaagctcaccgtggacaagagcaggtggcagcaggggaacgtcttctcatgctccgtgatgcatgaggctctgcacaaccactacacgcagaagagcctctccctgtctccgggtggtggcggatcgggaggtggcggatcccaggtacagttgcaggagtcaggtccaggactggtgaagccctcggagaccctctcactcacctgtaccatctccggggacagtgtctctaccaacagtgttgcttggaactggattaggcagcccccagggaaaggccttgagtggataggaaggacatactacaggtccaagtggtataatgattatgcagtttctctgaaaagtcgagtaaccatcagcccagacacatccaagaaccagttctccctgaagctgagctctgtgactgccgcggacacggctgtgtattactgtgcaagagaggatggggatagctactaccgctacggtatggacgtctggggccaagggaccacggtcaccgtctcctcagcctccaccaagggcccatcggtcttccccctggcaccctcctccaagagcacctctgggggcacagcggccctgggctgcctggtcaaggactacttccccgaaccggtgacggtgtcgtggaactcaggcgccctgaccagcggcgtgcacaccttcccggctgtcctacagtcctcaggactctactccctcgagagcgtggtgaccgtgccctccagcagcttgggcacccagacctacatctgcaacgtgaatcacaagcccagcaacaccaaggtggacaagaaagttgagcccaaatcttgt

SEQ ID NO: 105 - DNA, 645 bp, synthetic construct; identical to SEQ ID NO: 93
  misc_feature 1..645: note = source = /note="Description of Artificial Sequence: Synthetic polynucleotide"
  source 1..645: mol_type = other DNA

SEQ ID NO: 106 - protein, 220 aa, synthetic construct; identical to SEQ ID NO: 17
  REGION 1..220: note = source = /note="Description of Artificial Sequence: Synthetic polypeptide"

SEQ ID NO: 107 - protein, 684 aa, synthetic construct
  REGION 1..684: note = source = /note="Description of Artificial Sequence: Synthetic polypeptide"
EVQLVQSGAEVKKPGESLKISCKTSEYSFTSYWIGWVRQMPGKGLEWMGIIYLGDSDTRYSPSFQGQVTISADKSISTAYLQWSSLKASDTAMYYCARSNWGLDYWGQGTLVTVSSQPKANPTVTLFPPSSEELQANKATLVCLISDFYPGAVTVAWKADGSPVKAGVETTKPSKQSNNKYAAKSYLSLTPEQWKSHRSYSCQVTHEGSTVEKTVAPTECSDKTHTCPPCPAPELLGGPSVFLFPPKPKDTLMISRTPEVTCVVVDVSHEDPEVKFNWYVDGVEVHNAKTKPCEEQYGSTYRCVSVLTVLHQDWLNGKEYKCKVSNKALPAPIEKTISKAKGQPREPQVYTLPPSREEMTKNQVSLTCLVKGFYPSDIAVEWESNGQPENNYKTTPPVLDSDGSFFLYSKLTVDKSRWQQGNVFSCSVMHEALHNHYTQKSLSLSPGGGGSGGGGSQVQLQESGPGLVKPSETLSLTCTISGDSVSTNSVAWNWIRQPPGKGLEWIGRTYYRSKWYNDYAVSLKSRVTISPDTSKNQFSLKLSSVTAADTAVYYCAREDGDSYYRYGMDVWGQGTTVTVSSASTKGPSVFPLAPSSKSTSGGTAALGCLVKDYFPEPVTVSWNSGALTSGVHTFPAVLQSSGLYSLESVVTVPSSSLGTQTYICNVNHKPSNTKVDKKVEPKSC

SEQ ID NO: 108 - protein, 215 aa, synthetic construct; identical to SEQ ID NO: 96
  REGION 1..215: note = source = /note="Description of Artificial Sequence: Synthetic polypeptide"

SEQ ID NO: 109 - DNA, 642 bp, synthetic construct; identical to SEQ ID NO: 38
  misc_feature 1..642: note = source = /note="Description of Artificial Sequence: Synthetic polynucleotide"
  source 1..642: mol_type = other DNA

SEQ ID NO: 110 - DNA, 2055 bp, synthetic construct
  misc_feature 1..2055: note = source = /note="Description of Artificial Sequence: Synthetic polynucleotide"
  source 1..2055: mol_type = other DNA
caggtgcagttacagcagtcgggcgcaggactgttgaagccttcggagaccctgtccctcacctgcgctgtccatggtgggtccttcagtggttactactggaactggattcgccagccaccagggaaggggctagagtggattggggaaatcaatcatgctggaaacaccaactacaacccgtccctcaagagtcgagtcaccatatcattagacacgtccaagaaccagttctccctgacgctgacctctgtgaccgccgcggacacggctgtgtattactgtgcgagaggatattgtagaagtaccacctgctactttgactactggggccagggaaccctagtcaccgtctcctcaacggtggctgcaccatctgtcttcatcttcccgccatctgatgagcagttgaaatctggaactgcctctgttgtgtgcctgctgaataacttctatcccagagaggccaaagtacagtggaaggtggataacgccctccaatcgggtaactcccaggagagtgtcacagagcaggacagcaaggacagcacctacagcctcaagagcaccctgacgctgagcaaagcagactacgagaaacacaaagtctacgcctgcgaagtcacccatcagggcctgagctcgcccgtcacaaagagcttcaacaggggagagtgtgacaaaactcacacatgcccaccgtgcccagcacctgaactcctggggggaccgtcagtcttcctcttccccccaaaacccaaggacaccctcatgatctcccggacccctgaggtcacatgcgtggtggtggacgtgagccacgaagaccctgaggtcaagttcaactggtacgtggacggcgtggaggtgcataatgccaagacaaagccgtgtgaggagcagtacggcagcacgtaccgttgtgtcagcgtcctcaccgtcctgcaccaggactggctgaatggcaaggagtacaagtgcaaggtctccaacaaagccctcccagcccccatcgagaaaaccatctccaaagccaaagggcagccccgagaaccacaggtgtacaccctgcccccatcccgggaggagatgaccaagaaccaggtcagcctgacctgcctggtcaaaggcttctatcccagcgacatcgccgtggagtgggagagcaatgggcagccggagaacaactacaagaccacgcctcccgtgctggactccgacggctccttcttcctctatagcaagctcaccgtggacaagagcaggtggcagcaggggaacgtcttctcatgctccgtgatgcatgaggctctgcacaaccactacacgcagaagagcctctccctgtctccgggtggtggcggatcgggaggtggcggatccgaggtacaactggtggaatcaggtggaggtttggtgcagccggggagatcgctcaggcttagctgtgcggcatcggggtttactttcgatgattatgcgatgcattgggtccggcaagcgcctggaaaagggctcgagtgggtttccgccattacgtggaatagcggacacatcgattatgcagacagtgtggagggcagattcacaatctcacgagacaatgctaagaacagcctgtaccttcagatgaactcacttcgcgcggaagataccgccgtatactactgcgccaaagtctcctacttgtctacagcttcgtcgctcgactattggggtcaaggaacgttggtcaccgtctctagtgcctccaccaagggcccatcggtcttccccctggcaccctcctccaagagcacctctgggggcacagcggccctgggctgcctggtcaaggactacttccccgaaccggtgacggtgtcgtggaactcaggcgccctgaccagcggcgtgcacaccttcccggctgtcctacagtcctcaggactctactccctcgagagcgtggtgaccgtgccctccagcagcttgggcacccagacctacatctgcaacgtgaatcacaagcccagcaacaccaaggtggacaagaaagttgagcccaaatcttgt

SEQ ID NO: 111 - DNA, 633 bp, synthetic construct
  misc_feature 1..633: note = source = /note="Description of Artificial Sequence: Synthetic polynucleotide"
  source 1..633: mol_type = other DNA
gaaattgtgttgacgcagtctccaggcaccctgtctttgtctccaggggaaagagccaccctctcctgcagggccagtcagagtgttagaagcagttacttagcctggtaccagcagaaacctggccaggctcccaggctcctcatctatggtgcatccagcagggccactggcatcccagacaggttcagtggcagtgggtctgggacagacttcactctcaccatcagcagactggagcctgaagattttgcagtgtattactgtcagcagtatggtagctcacctaccttcggccaagggacacgactggagattaaacgagcctccaccaagggcccatcggtcttccccctggcaccctcctccaagagcacctctgggggcacagcggccctgggctgcctggtcaaggactacttccccgaaccggtgacggtgtcgtggaactcaggcgccctgaccagcggcgtgcacaccttcccggctgtcctacagtcctcaggactctactccctcgaaagcgtggtgaccgtgccctccagcagcttgggcacccagacctacatctgcaacgtgaatcacaagcccagcaacaccaaggtggacaagaaagttgagcccaaatcttgt

SEQ ID NO: 112 - protein, 214 aa, synthetic construct; identical to SEQ ID NO: 41
  REGION 1..214: note = source = /note="Description of Artificial Sequence: Synthetic polypeptide"

SEQ ID NO: 113 - protein, 685 aa, synthetic construct
  REGION 1..685: note = source = /note="Description of Artificial Sequence: Synthetic polypeptide"
QVQLQQSGAGLLKPSETLSLTCAVHGGSFSGYYWNWIRQPPGKGLEWIGEINHAGNTNYNPSLKSRVTISLDTSKNQFSLTLTSVTAADTAVYYCARGYCRSTTCYFDYWGQGTLVTVSSTVAAPSVFIFPPSDEQLKSGTASVVCLLNNFYPREAKVQWKVDNALQSGNSQESVTEQDSKDSTYSLKSTLTLSKADYEKHKVYACEVTHQGLSSPVTKSFNRGECDKTHTCPPCPAPELLGGPSVFLFPPKPKDTLMISRTPEVTCVVVDVSHEDPEVKFNWYVDGVEVHNAKTKPCEEQYGSTYRCVSVLTVLHQDWLNGKEYKCKVSNKALPAPIEKTISKAKGQPREPQVYTLPPSREEMTKNQVSLTCLVKGFYPSDIAVEWESNGQPENNYKTTPPVLDSDGSFFLYSKLTVDKSRWQQGNVFSCSVMHEALHNHYTQKSLSLSPGGGGSGGGGSEVQLVESGGGLVQPGRSLRLSCAASGFTFDDYAMHWVRQAPGKGLEWVSAITWNSGHIDYADSVEGRFTISRDNAKNSLYLQMNSLRAEDTAVYYCAKVSYLSTASSLDYWGQGTLVTVSSASTKGPSVFPLAPSSKSTSGGTAALGCLVKDYFPEPVTVSWNSGALTSGVHTFPAVLQSSGLYSLESVVTVPSSSLGTQTYICNVNHKPSNTKVDKKVEPKSC

SEQ ID NO: 114 - protein, 211 aa, synthetic construct
  REGION 1..211: note = source = /note="Description of Artificial Sequence: Synthetic polypeptide"
EIVLTQSPGTLSLSPGERATLSCRASQSVRSSYLAWYQQKPGQAPRLLIYGASSRATGIPDRFSGSGSGTDFTLTISRLEPEDFAVYYCQQYGSSPTFGQGTRLEIKRASTKGPSVFPLAPSSKSTSGGTAALGCLVKDYFPEPVTVSWNSGALTSGVHTFPAVLQSSGLYSLESVVTVPSSSLGTQTYICNVNHKPSNTKVDKKVEPKSC

SEQ ID NO: 115 - DNA, 651 bp, synthetic construct; identical to SEQ ID NO: 44
  misc_feature 1..651: note = source = /note="Description of Artificial Sequence: Synthetic polynucleotide"
  source 1..651: mol_type = other DNA

SEQ ID NO: 116 - DNA, 2040 bp, synthetic construct
  misc_feature 1..2040: note = source = /note="Description of Artificial Sequence: Synthetic polynucleotide"
  source 1..2040: mol_type = other DNA
caggtgcagttacagcagtcgggcgcaggactgttgaagccttcggagaccctgtccctcacctgcgctgtccatggtgggtccttcagtggttactactggaactggattcgccagccaccagggaaggggctagagtggattggggaaatcaatcatgctggaaacaccaactacaacccgtccctcaagagtcgagtcaccatatcattagacacgtccaagaaccagttctccctgacgctgacctctgtgaccgccgcggacacggctgtgtattactgtgcgagaggatattgtagaagtaccacctgctactttgactactggggccagggaaccctagtcaccgtctcctcaacggtggctgcaccatctgtcttcatcttcccgccatctgatgagcagttgaaatctggaactgcctctgttgtgtgcctgctgaataacttctatcccagagaggccaaagtacagtggaaggtggataacgccctccaatcgggtaactcccaggagagtgtcacagagcaggacagcaaggacagcacctacagcctcaagagcaccctgacgctgagcaaagcagactacgagaaacacaaagtctacgcctgcgaagtcacccatcagggcctgagctcgcccgtcacaaagagcttcaacaggggagagtgtgacaaaactcacacatgcccaccgtgcccagcacctgaactcctggggggaccgtcagtcttcctcttccccccaaaacccaaggacaccctcatgatctcccggacccctgaggtcacatgcgtggtggtggacgtgagccacgaagaccctgaggtcaagttcaactggtacgtggacggcgtggaggtgcataatgccaagacaaagccgtgtgaggagcagtacggcagcacgtaccgttgtgtcagcgtcctcaccgtcctgcaccaggactggctgaatggcaaggagtacaagtgcaaggtctccaacaaagccctcccagcccccatcgagaaaaccatctccaaagccaaagggcagccccgagaaccacaggtgtacaccctgcccccatcccgggaggagatgaccaagaaccaggtcagcctgacctgcctggtcaaaggcttctatcccagcgacatcgccgtggagtgggagagcaatgggcagccggagaacaactacaagaccacgcctcccgtgctggactccgacggctccttcttcctctatagcaagctcaccgtggacaagagcaggtggcagcaggggaacgtcttctcatgctccgtgatgcatgaggctctgcacaaccactacacgcagaagagcctctccctgtctccgggtggtggcggatcgggaggtggcggatccgaggtgcagctggtgcagtctggagcagaggtgaaaaagcccggggagtctctgaagatctcctgtaagacttctgaatacagctttaccagctactggatcggctgggtgcgccagatgcccgggaaaggcctggagtggatggggatcatctatcttggtgactcagataccagatacagcccgtccttccaaggccaggtcaccatctcagccgacaagtccatcagtaccgcctacctgcagtggagcagcctgaaggcctcggacaccgccatgtattactgtgcgagaagtaactggggtcttgactactggggccagggaaccctggtcaccgtctctagtgcctccaccaagggcccatcggtcttccccctggcaccctcctccaagagcacctctgggggcacagcggccctgggctgcctggtcaaggactacttccccgaaccggtgacggtgtcgtggaactcaggcgccctgaccagcggcgtgcacaccttcccggctgtcctacagtcctcaggactctactccctcgagagcgtggtgaccgtgccctccagcagcttgggcacccagacctacatctgcaacgtgaatcacaagcccagcaacaccaaggtggacaagaaagttgagcccaaatcttgt

SEQ ID NO: 117 - DNA, 633 bp, synthetic construct; identical to SEQ ID NO: 111
  misc_feature 1..633: note = source = /note="Description of Artificial Sequence: Synthetic polynucleotide"
  source 1..633: mol_type = other DNA

SEQ ID NO: 118 - protein, 217 aa, synthetic construct; identical to SEQ ID NO: 47
  REGION 1..217: note = source = /note="Description of Artificial Sequence: Synthetic polypeptide"

SEQ ID NO: 119 - protein, 680 aa, synthetic construct
  REGION 1..680: note = source = /note="Description of Artificial Sequence: Synthetic polypeptide"
QVQLQQSGAGLLKPSETLSLTCAVHGGSFSGYYWNWIRQPPGKGLEWIGEINHAGNTNYNPSLKSRVTISLDTSKNQFSLTLTSVTAADTAVYYCARGYCRSTTCYFDYWGQGTLVTVSSTVAAPSVFIFPPSDEQLKSGTASVVCLLNNFYPREAKVQWKVDNALQSGNSQESVTEQDSKDSTYSLKSTLTLSKADYEKHKVYACEVTHQGLSSPVTKSFNRGECDKTHTCPPCPAPELLGGPSVFLFPPKPKDTLMISRTPEVTCVVVDVSHEDPEVKFNWYVDGVEVHNAKTKPCEEQYGSTYRCVSVLTVLHQDWLNGKEYKCKVSNKALPAPIEKTISKAKGQPREPQVYTLPPSREEMTKNQVSLTCLVKGFYPSDIAVEWESNGQPENNYKTTPPVLDSDGSFFLYSKLTVDKSRWQQGNVFSCSVMHEALHNHYTQKSLSLSPGGGGSGGGGSEVQLVQSGAEVKKPGESLKISCKTSEYSFTSYWIGWVRQMPGKGLEWMGIIYLGDSDTRYSPSFQGQVTISADKSISTAYLQWSSLKASDTAMYYCARSNWGLDYWGQGTLVTVSSASTKGPSVFPLAPSSKSTSGGTAALGCLVKDYFPEPVTVSWNSGALTSGVHTFPAVLQSSGLYSLESVVTVPSSSLGTQTYICNVNHKPSNTKVDKKVEPKSC

SEQ ID NO: 120 - protein, 211 aa, synthetic construct; identical to SEQ ID NO: 114
  REGION 1..211: note = source = /note="Description of Artificial Sequence: Synthetic polypeptide"

SEQ ID NO: 121 - DNA, 642 bp, synthetic construct; identical to SEQ ID NO: 38
  misc_feature 1..642: note = source = /note="Description of Artificial Sequence: Synthetic polynucleotide"
  source 1..642: mol_type = other DNA

SEQ ID NO: 122 - DNA, 2049 bp, synthetic construct
  misc_feature 1..2049: note = source = /note="Description of Artificial Sequence: Synthetic polynucleotide"
  source 1..2049: mol_type = other DNA
caggtgcagctgcaggagtcgggcccaggactggtgaagccttcggagaccctgtccctcacctgcactgtctctggtggctccatcagtagttacttctggagctggattcggcagcccccaggtaagggactggagtggattggctatatctattacagtgggcagaccaaatacaacccctccctcaagagtcgagtcaccatatcaatagacacgtccaagaaccagttctccctgaagctgagctctgtgaccgctgcggacacggccgtgtattactgtgcgagagaaactgggagctactacggctttgactactggggccagggaaccctggtcaccgtctcctcaacggtggctgcaccatctgtcttcatcttcccgccatctgatgagcagttgaaatctggaactgcctctgttgtgtgcctgctgaataacttctatcccagagaggccaaagtacagtggaaggtggataacgccctccaatcgggtaactcccaggagagtgtcacagagcaggacagcaaggacagcacctacagcctcaagagcaccctgacgctgagcaaagcagactacgagaaacacaaagtctacgcctgcgaagtcacccatcagggcctgagctcgcccgtcacaaagagcttcaacaggggagagtgtgacaaaactcacacatgcccaccgtgcccagcacctgaactcctggggggaccgtcagtcttcctcttccccccaaaacccaaggacaccctcatgatctcccggacccctgaggtcacatgcgtggtggtggacgtgagccacgaagaccctgaggtcaagttcaactggtacgtggacggcgtggaggtgcataatgccaagacaaagccgtgtgaggagcagtacggcagcacgtaccgttgtgtcagcgtcctcaccgtcctgcaccaggactggctgaatggcaaggagtacaagtgcaaggtctccaacaaagccctcccagcccccatcgagaaaaccatctccaaagccaaagggcagccccgagaaccacaggtgtacaccctgcccccatcccgggaggagatgaccaagaaccaggtcagcctgacctgcctggtcaaaggcttctatcccagcgacatcgccgtggagtgggagagcaatgggcagccggagaacaactacaagaccacgcctcccgtgctggactccgacggctccttcttcctctatagcaagctcaccgtggacaagagcaggtggcagcaggggaacgtcttctcatgctccgtgatgcatgaggctctgcacaaccactacacgcagaagagcctctccctgtctccgggtggtggcggatcgggaggtggcggatccgaggtacaactggtggaatcaggtggaggtttggtgcagccggggagatcgctcaggcttagctgtgcggcatcggggtttactttcgatgattatgcgatgcattgggtccggcaagcgcctggaaaagggctcgagtgggtttccgccattacgtggaatagcggacacatcgattatgcagacagtgtggagggcagattcacaatctcacgagacaatgctaagaacagcctgtaccttcagatgaactcacttcgcgcggaagataccgccgtatactactgcgccaaagtctcctacttgtctacagcttcgtcgctcgactattggggtcaaggaacgttggtcaccgtctctagtgcctccaccaagggcccatcggtcttccccctggcaccctcctccaagagcacctctgggggcacagcggccctgggctgcctggtcaaggactacttccccgaaccggtgacggtgtcgtggaactcaggcgccctgaccagcggcgtgcacaccttcccggctgtcctacagtcctcaggactctactccctcgagagcgtggtgaccgtgccctccagcagcttgggcacccagacctacatctgcaacgtgaatcacaagcccagcaacaccaaggtggacaagaaagttgagcccaaatcttgt

SEQ ID NO: 123 - DNA, 633 bp, synthetic construct
  misc_feature 1..633: note = source = /note="Description of Artificial Sequence: Synthetic polynucleotide"
  source 1..633: mol_type = other DNA
gacatccagatgacccagtctccatcctccctgtctgcatctgtaggagacagagtcaccatcacttgccgggcaagtcagagcattaacaactatttaaattggtatcagcagagaccagggaaagcccctaagctcctgatctatgctgcatccagtttgcaaagtggggtcccatcaaggttcagtggcagtggatctgggacagatttcactctcaccatcagcagtctgcaacctgaagattttgcaacttactactgtcaacagagttacagtacccctcggacgttcggccaagggaccaagctggaaatcaaacgagcctccaccaagggcccatcggtcttccccctggcaccctcctccaagagcacctctgggggcacagcggccctgggctgcctggtcaaggactacttccccgaaccggtgacggtgtcgtggaactcaggcgccctgaccagcggcgtgcacaccttcccggctgtcctacagtcctcaggactctactccctcgaaagcgtggtgaccgtgccctccagcagcttgggcacccagacctacatctgcaacgtgaatcacaagcccagcaacaccaaggtggacaagaaagttgagcccaaatcttgt

SEQ ID NO: 124 - protein, 214 aa, synthetic construct; identical to SEQ ID NO: 41
  REGION 1..214: note = source = /note="Description of Artificial Sequence: Synthetic polypeptide"

SEQ ID NO: 125 - protein, 683 aa, synthetic construct
  REGION 1..683: note = source = /note="Description of Artificial Sequence: Synthetic polypeptide"
QVQLQESGPGLVKPSETLSLTCTVSGGSISSYFWSWIRQPPGKGLEWIGYIYYSGQTKYNPSLKSRVTISIDTSKNQFSLKLSSVTAADTAVYYCARETGSYYGFDYWGQGTLVTVSSTVAAPSVFIFPPSDEQLKSGTASVVCLLNNFYPREAKVQWKVDNALQSGNSQESVTEQDSKDSTYSLKSTLTLSKADYEKHKVYACEVTHQGLSSPVTKSFNRGECDKTHTCPPCPAPELLGGPSVFLFPPKPKDTLMISRTPEVTCVVVDVSHEDPEVKFNWYVDGVEVHNAKTKPCEEQYGSTYRCVSVLTVLHQDWLNGKEYKCKVSNKALPAPIEKTISKAKGQPREPQVYTLPPSREEMTKNQVSLTCLVKGFYPSDIAVEWESNGQPENNYKTTPPVLDSDGSFFLYSKLTVDKSRWQQGNVFSCSVMHEALHNHYTQKSLSLSPGGGGSGGGGSEVQLVESGGGLVQPGRSLRLSCAASGFTFDDYAMHWVRQAPGKGLEWVSAITWNSGHIDYADSVEGRFTISRDNAKNSLYLQMNSLRAEDTAVYYCAKVSYLSTASSLDYWGQGTLVTVSSASTKGPSVFPLAPSSKSTSGGTAALGCLVKDYFPEPVTVSWNSGALTSGVHTFPAVLQSSGLYSLESVVTVPSSSLGTQTYICNVNHKPSNTKVDKKVEPKSC

SEQ ID NO: 126 - protein, 211 aa, synthetic construct
  REGION 1..211: note = source = /note="Description of Artificial Sequence: Synthetic polypeptide"
DIQMTQSPSSLSASVGDRVTITCRASQSINNYLNWYQQRPGKAPKLLIYAASSLQSGVPSRFSGSGSGTDFTLTISSLQPEDFATYYCQQSYSTPRTFGQGTKLEIKRASTKGPSVFPLAPSSKSTSGGTAALGCLVKDYFPEPVTVSWNSGALTSGVHTFPAVLQSSGLYSLESVVTVPSSSLGTQTYICNVNHKPSNTKVDKKVEPKSC

SEQ ID NO: 127 - DNA, 651 bp, synthetic construct; identical to SEQ ID NO: 44
  misc_feature 1..651: note = source = /note="Description of Artificial Sequence: Synthetic polynucleotide"
  source 1..651: mol_type = other DNA

SEQ ID NO: 128 - DNA, 2034 bp, synthetic construct
  misc_feature 1..2034: note = source = /note="Description of Artificial Sequence: Synthetic polynucleotide"
  source 1..2034: mol_type = other DNA
caggtgcagctgcaggagtcgggcccaggactggtgaagccttcggagaccctgtccctcacctgcactgtctctggtggctccatcagtagttacttctggagctggattcggcagcccccaggtaagggactggagtggattggctatatctattacagtgggcagaccaaatacaacccctccctcaagagtcgagtcaccatatcaatagacacgtccaagaaccagttctccctgaagctgagctctgtgaccgctgcggacacggccgtgtattactgtgcgagagaaactgggagctactacggctttgactactggggccagggaaccctggtcaccgtctcctcaacggtggctgcaccatctgtcttcatcttcccgccatctgatgagcagttgaaatctggaactgcctctgttgtgtgcctgctgaataacttctatcccagagaggccaaagtacagtggaaggtggataacgccctccaatcgggtaactcccaggagagtgtcacagagcaggacagcaaggacagcacctacagcctcaagagcaccctgacgctgagcaaagcagactacgagaaacacaaagtctacgcctgcgaagtcacccatcagggcctgagctcgcccgtcacaaagagcttcaacaggggagagtgtgacaaaactcacacatgcccaccgtgcccagcacctgaactcctggggggaccgtcagtcttcctcttccccccaaaacccaaggacaccctcatgatctcccggacccctgaggtcacatgcgtggtggtggacgtgagccacgaagaccctgaggtcaagttcaactggtacgtggacggcgtggaggtgcataatgccaagacaaagccgtgtgaggagcagtacggcagcacgtaccgttgtgtcagcgtcctcaccgtcctgcaccaggactggctgaatggcaaggagtacaagtgcaaggtctccaacaaagccctcccagcccccatcgagaaaaccatctccaaagccaaagggcagccccgagaaccacaggtgtacaccctgcccccatcccgggaggagatgaccaagaaccaggtcagcctgacctgcctggtcaaaggcttctatcccagcgacatcgccgtggagtgggagagcaatgggcagccggagaacaactacaagaccacgcctcccgtgctggactccgacggctccttcttcctctatagcaagctcaccgtggacaagagcaggtggcagcaggggaacgtcttctcatgctccgtgatgcatgaggctctgcacaaccactacacgcagaagagcctctccctgtctccgggtggtggcggatcgggaggtggcggatccgaggtgcagctggtgcagtctggagcagaggtgaaaaagcccggggagtctctgaagatctcctgtaagacttctgaatacagctttaccagctactggatcggctgggtgcgccagatgcccgggaaaggcctggagtggatggggatcatctatcttggtgactcagataccagatacagcccgtccttccaaggccaggtcaccatctcagccgacaagtccatcagtaccgcctacctgcagtggagcagcctgaaggcctcggacaccgccatgtattactgtgcgagaagtaactggggtcttgactactggggccagggaaccctggtcaccgtctctagtgcctccaccaagggcccatcggtcttccccctggcaccctcctccaagagcacctctgggggcacagcggccctgggctgcctggtcaaggactacttccccgaaccggtgacggtgtcgtggaactcaggcgccctgaccagcggcgtgcacaccttcccggctgtcctacagtcctcaggactctactccctcgagagcgtggtgaccgtgccctccagcagcttgggcacccagacctacatctgcaacgtgaatcacaagcccagcaacaccaaggtggacaagaaagttgagcccaaatcttgt

SEQ ID NO: 129 - DNA, 633 bp, synthetic construct; identical to SEQ ID NO: 123
  misc_feature 1..633: note = source = /note="Description of Artificial Sequence: Synthetic polynucleotide"
  source 1..633: mol_type = other DNA

SEQ ID NO: 130 - protein, 217 aa, synthetic construct; identical to SEQ ID NO: 47
  REGION 1..217: note = source = /note="Description of Artificial Sequence: Synthetic polypeptide"

SEQ ID NO: 131 - protein, 678 aa, synthetic construct
  REGION 1..678: note = source = /note="Description of Artificial Sequence: Synthetic polypeptide"
QVQLQESGPGLVKPSETLSLTCTVSGGSISSYFWSWIRQPPGKGLEWIGYIYYSGQTKYNPSLKSRVTISIDTSKNQFSLKLSSVTAADTAVYYCARETGSYYGFDYWGQGTLVTVSSTVAAPSVFIFPPSDEQLKSGTASVVCLLNNFYPREAKVQWKVDNALQSGNSQESVTEQDSKDSTYSLKSTLTLSKADYEKHKVYACEVTHQGLSSPVTKSFNRGECDKTHTCPPCPAPELLGGPSVFLFPPKPKDTLMISRTPEVTCVVVDVSHEDPEVKFNWYVDGVEVHNAKTKPCEEQYGSTYRCVSVLTVLHQDWLNGKEYKCKVSNKALPAPIEKTISKAKGQPREPQVYTLPPSREEMTKNQVSLTCLVKGFYPSDIAVEWESNGQPENNYKTTPPVLDSDGSFFLYSKLTVDKSRWQQGNVFSCSVMHEALHNHYTQKSLSLSPGGGGSGGGGSEVQLVQSGAEVKKPGESLKISCKTSEYSFTSYWIGWVRQMPGKGLEWMGIIYLGDSDTRYSPSFQGQVTISADKSISTAYLQWSSLKASDTAMYYCARSNWGLDYWGQGTLVTVSSASTKGPSVFPLAPSSKSTSGGTAALGCLVKDYFPEPVTVSWNSGALTSGVHTFPAVLQSSGLYSLESVVTVPSSSLGTQTYICNVNHKPSNTKVDKKVEPKSC

SEQ ID NO: 132 - protein, 211 aa, synthetic construct; identical to SEQ ID NO: 126
  REGION 1..211: note = source = /note="Description of Artificial Sequence: Synthetic polypeptide"

SEQ ID NO: 133 - DNA, 642 bp, synthetic construct; identical to SEQ ID NO: 38
  misc_feature 1..642: note = source = /note="Description of Artificial Sequence: Synthetic polynucleotide"
  source 1..642: mol_type = other DNA

SEQ ID NO: 134 - DNA, 2070 bp, synthetic construct
  misc_feature 1..2070: note = source = /note="Description of Artificial Sequence: Synthetic polynucleotide"
  source 1..2070: mol_type = other DNA
caggtacagttgcaggagtcaggtccaggactggtgaagccctcggagaccctctcactcacctgtaccatctccggggacagtgtctctaccaacagtgttgcttggaactggattaggcagcccccagggaaaggccttgagtggataggaaggacatactacaggtccaagtggtataatgattatgcagtttctctgaaaagtcgagtaaccatcagcccagacacatccaagaaccagttctccctgaagctgagctctgtgactgccgcggacacggctgtgtattactgtgcaagagaggatggggatagctactaccgctacggtatggacgtctggggccaagggaccacggtcaccgtctcctcaacggtggctgcaccatctgtcttcatcttcccgccatctgatgagcagttgaaatctggaactgcctctgttgtgtgcctgctgaataacttctatcccagagaggccaaagtacagtggaaggtggataacgccctccaatcgggtaactcccaggagagtgtcacagagcaggacagcaaggacagcacctacagcctcaagagcaccctgacgctgagcaaagcagactacgagaaacacaaagtctacgcctgcgaagtcacccatcagggcctgagctcgcccgtcacaaagagcttcaacaggggagagtgtgacaaaactcacacatgcccaccgtgcccagcacctgaactcctggggggaccgtcagtcttcctcttccccccaaaacccaaggacaccctcatgatctcccggacccctgaggtcacatgcgtggtggtggacgtgagccacgaagaccctgaggtcaagttcaactggtacgtggacggcgtggaggtgcataatgccaagacaaagccgtgtgaggagcagtacggcagcacgtaccgttgtgtcagcgtcctcaccgtcctgcaccaggactggctgaatggcaaggagtacaagtgcaaggtctccaacaaagccctcccagcccccatcgagaaaaccatctccaaagccaaagggcagccccgagaaccacaggtgtacaccctgcccccatcccgggaggagatgaccaagaaccaggtcagcctgacctgcctggtcaaaggcttctatcccagcgacatcgccgtggagtgggagagcaatgggcagccggagaacaactacaagaccacgcctcccgtgctggactccgacggctccttcttcctctatagcaagctcaccgtggacaagagcaggtggcagcaggggaacgtcttctcatgctccgtgatgcatgaggctctgcacaaccactacacgcagaagagcctctccctgtctccgggtggtggcggatcgggaggtggcggatccgaggtacaactggtggaatcaggtggaggtttggtgcagccggggagatcgctcaggcttagctgtgcggcatcggggtttactttcgatgattatgcgatgcattgggtccggcaagcgcctggaaaagggctcgagtgggtttccgccattacgtggaatagcggacacatcgattatgcagacagtgtggagggcagattcacaatctcacgagacaatgctaagaacagcctgtaccttcagatgaactcacttcgcgcggaagataccgccgtatactactgcgccaaagtctcctacttgtctacagcttcgtcgctcgactattggggtcaaggaacgttggtcaccgtctctagtgcctccaccaagggcccatcggtcttccccctggcaccctcctccaagagcacctctgggggcacagcggccctgggctgcctggtcaaggactacttccccgaaccggtgacggtgtcgtggaactcaggcgccctgaccagcggcgtgcacaccttcccggctgtcctacagtcctcaggactctactccctcgagagcgtggtgaccgtgccctccagcagcttgggcacccagacctacatctgcaacgtgaatcacaagcccagcaacaccaaggtggacaagaaagttgagcccaaatcttgt

SEQ ID NO: 135 - DNA, 651 bp, synthetic construct
  misc_feature 1..651: note = source = /note="Description of Artificial Sequence: Synthetic polynucleotide"
  source 1..651: mol_type = other DNA
gacatccagatgacccagtctccaagctccctgtctgcgtctgtgggcgatagggtcaccatcacttgcaggtccagccagagtgtgttatacagctccaacaataagaactacttagtttggtaccagcagaaaccaggaaaggttcctaaactgctcatttactgggcatctacccgggaatccggggtccctagtcgattcagtggcagcgggtctgggacagatttcactctcaccatcagcagcctgcagcctgaagatgtggcaacttattactgtcagcaatattataagactcctctcactttcggcggagggaccaaggtggagatcaaacgagcctccaccaagggcccatcggtcttccccctggcaccctcctccaagagcacctctgggggcacagcggccctgggctgcctggtcaaggactacttccccgaaccggtgacggtgtcgtggaactcaggcgccctgaccagcggcgtgcacaccttcccggctgtcctacagtcctcaggactctactccctcgaaagcgtggtgaccgtgccctccagcagcttgggcacccagacctacatctgcaacgtgaatcacaagcccagcaacaccaaggtggacaagaaagttgagcccaaatcttgt

SEQ ID NO: 136 - protein, 214 aa, synthetic construct; identical to SEQ ID NO: 41
  REGION 1..214: note = source = /note="Description of Artificial Sequence: Synthetic polypeptide"

SEQ ID NO: 137 - protein, 690 aa, synthetic construct
  REGION 1..690: note = source = /note="Description of Artificial Sequence: Synthetic polypeptide"
QVQLQESGPGLVKPSETLSLTCTISGDSVSTNSVAWNWIRQPPGKGLEWIGRTYYRSKWYNDYAVSLKSRVTISPDTSKNQFSLKLSSVTAADTAVYYCAREDGDSYYRYGMDVWGQGTTVTVSSTVAAPSVFIFPPSDEQLKSGTASVVCLLNNFYPREAKVQWKVDNALQSGNSQESVTEQDSKDSTYSLKSTLTLSKADYEKHKVYACEVTHQGLSSPVTKSFNRGECDKTHTCPPCPAPELLGGPSVFLFPPKPKDTLMISRTPEVTCVVVDVSHEDPEVKFNWYVDGVEVHNAKTKPCEEQYGSTYRCVSVLTVLHQDWLNGKEYKCKVSNKALPAPIEKTISKAKGQPREPQVYTLPPSREEMTKNQVSLTCLVKGFYPSDIAVEWESNGQPENNYKTTPPVLDSDGSFFLYSKLTVDKSRWQQGNVFSCSVMHEALHNHYTQKSLSLSPGGGGSGGGGSEVQLVESGGGLVQPGRSLRLSCAASGFTFDDYAMHWVRQAPGKGLEWVSAITWNSGHIDYADSVEGRFTISRDNAKNSLYLQMNSLRAEDTAVYYCAKVSYLSTASSLDYWGQGTLVTVSSASTKGPSVFPLAPSSKSTSGGTAALGCLVKDYFPEPVTVSWNSGALTSGVHTFPAVLQSSGLYSLESVVTVPSSSLGTQTYICNVNHKPSNTKVDKKVEPKSC

SEQ ID NO: 138 - protein, 217 aa, synthetic construct
  REGION 1..217: note = source = /note="Description of Artificial Sequence: Synthetic polypeptide"
DIQMTQSPSSLSASVGDRVTITCRSSQSVLYSSNNKNYLVWYQQKPGKVPKLLIYWASTRESGVPSRFSGSGSGTDFTLTISSLQPEDVATYYCQQYYKTPLTFGGGTKVEIKRASTKGPSVFPLAPSSKSTSGGTAALGCLVKDYFPEPVTVSWNSGALTSGVHTFPAVLQSSGLYSLESVVTVPSSSLGTQTYICNVNHKPSNTKVDKKVEPKSC

SEQ ID NO: 139 - DNA, 651 bp, synthetic construct; identical to SEQ ID NO: 44
  misc_feature 1..651: note = source = /note="Description of Artificial Sequence: Synthetic polynucleotide"
  source 1..651: mol_type = other DNA

SEQ ID NO: 140 - DNA, 2055 bp, synthetic construct
  misc_feature 1..2055: note = source = /note="Description of Artificial Sequence: Synthetic polynucleotide"
  source 1..2055: mol_type = other DNA
caggtacagttgcaggagtcaggtccaggactggtgaagccctcggagaccctctcactcacctgtaccatctccggggacagtgtctctaccaacagtgttgcttggaactggattaggcagcccccagggaaaggccttgagtggataggaaggacatactacaggtccaagtggtataatgattatgcagtttctctgaaaagtcgagtaaccatcagcccagacacatccaagaaccagttctccctgaagctgagctctgtgactgccgcggacacggctgtgtattactgtgcaagagaggatggggatagctactaccgctacggtatggacgtctggggccaagggaccacggtcaccgtctcctcaacggtggctgcaccatctgtcttcatcttcccgccatctgatgagcagttgaaatctggaactgcctctgttgtgtgcctgctgaataacttctatcccagagaggccaaagtacagtggaaggtggataacgccctccaatcgggtaactcccaggagagtgtcacagagcaggacagcaaggacagcacctacagcctcaagagcaccctgacgctgagcaaagcagactacgagaaacacaaagtctacgcctgcgaagtcacccatcagggcctgagctcgcccgtcacaaagagcttcaacaggggagagtgtgacaaaactcacacatgcccaccgtgcccagcacctgaactcctggggggaccgtcagtcttcctcttccccccaaaacccaaggacaccctcatgatctcccggacccctgaggtcacatgcgtggtggtggacgtgagccacgaagaccctgaggtcaagttcaactggtacgtggacggcgtggaggtgcataatgccaagacaaagccgtgtgaggagcagtacggcagcacgtaccgttgtgtcagcgtcctcaccgtcctgcaccaggactggctgaatggcaaggagtacaagtgcaaggtctccaacaaagccctcccagcccccatcgagaaaaccatctccaaagccaaagggcagccccgagaaccacaggtgtacaccctgcccccatcccgggaggagatgaccaagaaccaggtcagcctgacctgcctggtcaaaggcttctatcccagcgacatcgccgtggagtgggagagcaatgggcagccggagaacaactacaagaccacgcctcccgtgctggactccgacggctccttcttcctctatagcaagctcaccgtggacaagagcaggtggcagcaggggaacgtcttctcatgctccgtgatgcatgaggctctgcacaaccactacacgcagaagagcctctccctgtctccgggtggtggcggatcgggaggtggcggatccgaggtgcagctggtgcagtctggagcagaggtgaaaaagcccggggagtctctgaagatctcctgtaagacttctgaatacagctttaccagctactggatcggctgggtgcgccagatgcccgggaaaggcctggagtggatggggatcatctatcttggtgactcagataccagatacagcccgtccttccaaggccaggtcaccatctcagccgacaagtccatcagtaccgcctacctgcagtggagcagcctgaaggcctcggacaccgccatgtattactgtgcgagaagtaactggggtcttgactactggggccagggaaccctggtcaccgtctctagtgcctccaccaagggcccatcggtcttccccctggcaccctcctccaagagcacctctgggggcacagcggccctgggctgcctggtcaaggactacttccccgaaccggtgacggtgtcgtggaactcaggcgccctgaccagcggcgtgcacaccttcccggctgtcctacagtcctcaggactctactccctcgagagcgtggtgaccgtgccctccagcagcttgggcacccagacctacatctgcaacgtgaatcacaagcccagcaacaccaaggtggacaagaaagttgagcccaaatcttgt

SEQ ID NO: 141 - DNA, 651 bp, synthetic construct; identical to SEQ ID NO: 135
  misc_feature 1..651: note = source = /note="Description of Artificial Sequence: Synthetic polynucleotide"
  source 1..651: mol_type = other DNA

SEQ ID NO: 142 - protein, 217 aa, synthetic construct; identical to SEQ ID NO: 47
  REGION 1..217: note = source = /note="Description of Artificial Sequence: Synthetic polypeptide"

SEQ ID NO: 143 - protein, 685 aa, synthetic construct
  REGION 1..685: note = source = /note="Description of Artificial Sequence: Synthetic polypeptide"
QVQLQESGPGLVKPSETLSLTCTISGDSVSTNSVAWNWIRQPPGKGLEWIGRTYYRSKWYNDYAVSLKSRVTISPDTSKNQFSLKLSSVTAADTAVYYCAREDGDSYYRYGMDVWGQGTTVTVSSTVAAPSVFIFPPSDEQLKSGTASVVCLLNNFYPREAKVQWKVDNALQSGNSQESVTEQDSKDSTYSLKSTLTLSKADYEKHKVYACEVTHQGLSSPVTKSFNRGECDKTHTCPPCPAPELLGGPSVFLFPPKPKDTLMISRTPEVTCVVVDVSHEDPEVKFNWYVDGVEVHNAKTKPCEEQYGSTYRCVSVLTVLHQDWLNGKEYKCKVSNKALPAPIEKTISKAKGQPREPQVYTLPPSREEMTKNQVSLTCLVKGFYPSDIAVEWESNGQPENNYKTTPPVLDSDGSFFLYSKLTVDKSRWQQGNVFSCSVMHEALHNHYTQKSLSLSPGGGGSGGGGSEVQLVQSGAEVKKPGESLKISCKTSEYSFTSYWIGWVRQMPGKGLEWMGIIYLGDSDTRYSPSFQGQVTISADKSISTAYLQWSSLKASDTAMYYCARSNWGLDYWGQGTLVTVSSASTKGPSVFPLAPSSKSTSGGTAALGCLVKDYFPEPVTVSWNSGALTSGVHTFPAVLQSSGLYSLESVVTVPSSSLGTQTYICNVNHKPSNTKVDKKVEPKSC

SEQ ID NO: 144 - protein, 217 aa, synthetic construct; identical to SEQ ID NO: 138
  REGION 1..217: note = source = /note="Description of Artificial Sequence: Synthetic polypeptide"

SEQ ID NO: 145 - DNA, 642 bp, synthetic construct; identical to SEQ ID NO: 1
  misc_feature 1..642: note = source = /note="Description of Artificial Sequence: Synthetic polynucleotide"
  source 1..642: mol_type = other DNA

SEQ ID NO: 146 - DNA, 2055 bp, synthetic construct
  misc_feature 1..2055: note = source = /note="Description of Artificial Sequence: Synthetic polynucleotide"
  source 1..2055: mol_type = other DNA
gaggtacaactggtggaatcaggtggaggtttggtgcagccggggagatcgctcaggcttagctgtgcggcatcggggtttactttcgatgattatgcgatgcattgggtccggcaagcgcctggaaaagggctcgagtgggtttccgccattacgtggaatagcggacacatcgattatgcagacagtgtggagggcagattcacaatctcacgagacaatgctaagaacagcctgtaccttcagatgaactcacttcgcgcggaagataccgccgtatactactgcgccaaagtctcctacttgtctacagcttcgtcgctcgactattggggtcaaggaacgttggtcaccgtctctagtgcctccaccaagggcccatcggtcttccccctggcaccctcctccaagagcacctctgggggcacagcggccctgggctgcctggtcaaggactacttccccgaaccggtgacggtgtcgtggaactcaggcgccctgaccagcggcgtgcacaccttcccggctgtcctacagtcctcaggactctactccctcaaaagcgtggtgaccgtgccctccagcagcttgggcacccagacctacatctgcaacgtgaatcacaagcccagcaacaccaaggtggacaagaaagttgagcccaaatcttgtgacaaaactcacacatgcccaccgtgcccagcacctgaactcctggggggaccgtcagtcttcctcttccccccaaaacccaaggacaccctcatgatctcccggacccctgaggtcacatgcgtggtggtggacgtgagccacgaagaccctgaggtcaagttcaactggtacgtggacggcgtggaggtgcataatgccaagacaaagccgtgtgaggagcagtacggcagcacgtaccgttgtgtcagcgtcctcaccgtcctgcaccaggactggctgaatggcaaggagtacaagtgcaaggtctccaacaaagccctcccagcccccatcgagaaaaccatctccaaagccaaagggcagccccgagaaccacaggtgtacaccctgcccccatcccgggaggagatgaccaagaaccaggtcagcctgacctgcctggtcaaaggcttctatcccagcgacatcgccgtggagtgggagagcaatgggcagccggagaacaactacaagaccacgcctcccgtgctggactccgacggctccttcttcctctatagcaagctcaccgtggacaagagcaggtggcagcaggggaacgtcttctcatgctccgtgatgcatgaggctctgcacaaccactacacgcagaagagcctctccctgtctccgggtggtggcggatcgggaggtggcggatcccaggtgcagttacagcagtcgggcgcaggactgttgaagccttcggagaccctgtccctcacctgcgctgtccatggtgggtccttcagtggttactactggaactggattcgccagccaccagggaaggggctagagtggattggggaaatcaatcatgctggaaacaccaactacaacccgtccctcaagagtcgagtcaccatatcattagacacgtccaagaaccagttctccctgacgctgacctctgtgaccgccgcggacacggctgtgtattactgtgcgagaggatattgtagaagtaccacctgctactttgactactggggccagggaaccctagtcaccgtctcctcaactgtggctgcaccatctgtcttcatcttcccgccatctgatgagcagttgaaatctggaactgcctctgttgtgtgcctgctgaataacttctatcccagagaggccaaagtacagtggaaggtggataacgccctccaatcgggtaactcccaggagagtgtcacagagcaggacagcaaggacagcacctacagcctcgaaagcaccctgacgctgagcaaagcagactacgagaaacacaaagtctacgcctgcgaagtcacccatcagggcctgagctcgcccgtcacaaagagcttcaacaggggagagtgt

SEQ ID NO: 147 - DNA, 633 bp, synthetic construct
  misc_feature 1..633: note = source = /note="Description of Artificial Sequence: Synthetic polynucleotide"
  source 1..633: mol_type = other DNA
gaaattgtgttgacgcagtctccaggcaccctgtctttgtctccaggggaaagagccaccctctcctgcagggccagtcagagtgttagaagcagttacttagcctggtaccagcagaaacctggccaggctcccaggctcctcatctatggtgcatccagcagggccactggcatcccagacaggttcagtggcagtgggtctgggacagacttcactctcaccatcagcagactggagcctgaagattttgcagtgtattactgtcagcagtatggtagctcacctaccttcggccaagggacacgactggagattaaacgagcctccaccaagggcccatcggtcttccccctggcaccctcctccaagagcacctctgggggcacagcggccctgggctgcctggtcaaggactacttccccgaaccggtgacggtgtcgtggaactcaggcgccctgaccagcggcgtgcacaccttcccggctgtcctacagtcctcaggactctactccctcaaaagcgtggtgaccgtgccctccagcagcttgggcacccagacctacatctgcaacgtgaatcacaagcccagcaacaccaaggtggacaagaaagttgagcccaaatcttgt

SEQ ID NO: 148 - protein, 214 aa, synthetic construct; identical to SEQ ID NO: 4
  REGION 1..214: note = source = /note="Description of Artificial Sequence: Synthetic polypeptide"

SEQ ID NO: 149 - protein, 685 aa, synthetic construct
  REGION 1..685: note = source = /note="Description of Artificial Sequence: Synthetic polypeptide"
EVQLVESGGGLVQPGRSLRLSCAASGFTFDDYAMHWVRQAPGKGLEWVSAITWNSGHIDYADSVEGRFTISRDNAKNSLYLQMNSLRAEDTAVYYCAKVSYLSTASSLDYWGQGTLVTVSSASTKGPSVFPLAPSSKSTSGGTAALGCLVKDYFPEPVTVSWNSGALTSGVHTFPAVLQSSGLYSLKSVVTVPSSSLGTQTYICNVNHKPSNTKVDKKVEPKSCDKTHTCPPCPAPELLGGPSVFLFPPKPKDTLMISRTPEVTCVVVDVSHEDPEVKFNWYVDGVEVHNAKTKPCEEQYGSTYRCVSVLTVLHQDWLNGKEYKCKVSNKALPAPIEKTISKAKGQPREPQVYTLPPSREEMTKNQVSLTCLVKGFYPSDIAVEWESNGQPENNYKTTPPVLDSDGSFFLYSKLTVDKSRWQQGNVFSCSVMHEALHNHYTQKSLSLSPGGGGSGGGGSQVQLQQSGAGLLKPSETLSLTCAVHGGSFSGYYWNWIRQPPGKGLEWIGEINHAGNTNYNPSLKSRVTISLDTSKNQFSLTLTSVTAADTAVYYCARGYCRSTTCYFDYWGQGTLVTVSSTVAAPSVFIFPPSDEQLKSGTASVVCLLNNFYPREAKVQWKVDNALQSGNSQESVTEQDSKDSTYSLESTLTLSKADYEKHKVYACEVTHQGLSSPVTKSFNRGEC

SEQ ID NO: 150 - protein, 211 aa, synthetic construct
  REGION 1..211: note = source = /note="Description of Artificial Sequence: Synthetic polypeptide"
EIVLTQSPGTLSLSPGERATLSCRASQSVRSSYLAWYQQKPGQAPRLLIYGASSRATGIPDRFSGSGSGTDFTLTISRLEPEDFAVYYCQQYGSSPTFGQGTRLEIKRASTKGPSVFPLAPSSKSTSGGTAALGCLVKDYFPEPVTVSWNSGALTSGVHTFPAVLQSSGLYSLKSVVTVPSSSLGTQTYICNVNHKPSNTKVDKKVEPKSC

SEQ ID NO: 151 - DNA, 642 bp, synthetic construct; identical to SEQ ID NO: 1
  misc_feature 1..642: note = source = /note="Description of Artificial Sequence: Synthetic polynucleotide"
  source 1..642: mol_type = other DNA

SEQ ID NO: 152 - DNA, 2049 bp, synthetic construct
  misc_feature 1..2049: note = source = /note="Description of Artificial Sequence: Synthetic polynucleotide"
  source 1..2049: mol_type = other DNA
gaggtacaactggtggaatcaggtggaggtttggtgcagccggggagatcgctcaggcttagctgtgcggcatcggggtttactttcgatgattatgcgatgcattgggtccggcaagcgcctggaaaagggctcgagtgggtttccgccattacgtggaatagcggacacatcgattatgcagacagtgtggagggcagattcacaatctcacgagacaatgctaagaacagcctgtaccttcagatgaactcacttcgcgcggaagataccgccgtatactactgcgccaaagtctcctacttgtctacagcttcgtcgctcgactattggggtcaaggaacgttggtcaccgtctctagtgcctccaccaagggcccatcggtcttccccctggcaccctcctccaagagcacctctgggggcacagcggccctgggctgcctggtcaaggactacttccccgaaccggtgacggtgtcgtggaactcaggcgccctgaccagcggcgtgcacaccttcccggctgtcctacagtcctcaggactctactccctcaaaagcgtggtgaccgtgccctccagcagcttgggcacccagacctacatctgcaacgtgaatcacaagcccagcaacaccaaggtggacaagaaagttgagcccaaatcttgtgacaaaactcacacatgcccaccgtgcccagcacctgaactcctggggggaccgtcagtcttcctcttccccccaaaacccaaggacaccctcatgatctcccggacccctgaggtcacatgcgtggtggtggacgtgagccacgaagaccctgaggtcaagttcaactggtacgtggacggcgtggaggtgcataatgccaagacaaagccgtgtgaggagcagtacggcagcacgtaccgttgtgtcagcgtcctcaccgtcctgcaccaggactggctgaatggcaaggagtacaagtgcaaggtctccaacaaagccctcccagcccccatcgagaaaaccatctccaaagccaaagggcagccccgagaaccacaggtgtacaccctgcccccatcccgggaggagatgaccaagaaccaggtcagcctgacctgcctggtcaaaggcttctatcccagcgacatcgccgtggagtgggagagcaatgggcagccggagaacaactacaagaccacgcctcccgtgctggactccgacggctccttcttcctctatagcaagctcaccgtggacaagagcaggtggcagcaggggaacgtcttctcatgctccgtgatgcatgaggctctgcacaaccactacacgcagaagagcctctccctgtctccgggtggtggcggatcgggaggtggcggatcccaggtgcagctgcaggagtcgggcccaggactggtgaagccttcggagaccctgtccctcacctgcactgtctctggtggctccatcagtagttacttctggagctggattcggcagcccccaggtaagggactggagtggattggctatatctattacagtgggcagaccaaatacaacccctccctcaagagtcgagtcaccatatcaatagacacgtccaagaaccagttctccctgaagctgagctctgtgaccgctgcggacacggccgtgtattactgtgcgagagaaactgggagctactacggctttgactactggggccagggaaccctggtcaccgtctcctcaactgtggctgcaccatctgtcttcatcttcccgccatctgatgagcagttgaaatctggaactgcctctgttgtgtgcctgctgaataacttctatcccagagaggccaaagtacagtggaaggtggataacgccctccaatcgggtaactcccaggagagtgtcacagagcaggacagcaaggacagcacctacagcctcgaaagcaccctgacgctgagcaaagcagactacgagaaacacaaagtctacgcctgcgaagtcacccatcagggcctgagctcgcccgtcacaaagagcttcaacaggggagagtgt

SEQ ID NO: 153 - DNA, 633 bp, synthetic construct
  misc_feature 1..633: note = source = /note="Description of Artificial Sequence: Synthetic polynucleotide"
  source 1..633: mol_type = other DNA
gacatccagatgacccagtctccatcctccctgtctgcatctgtaggagacagagtcaccatcacttgccgggcaagtcagagcattaacaactatttaaattggtatcagcagagaccagggaaagcccctaagctcctgatctatgctgcatccagtttgcaaagtggggtcccatcaaggttcagtggcagtggatctgggacagatttcactctcaccatcagcagtctgcaacctgaagattttgcaacttactactgtcaacagagttacagtacccctcggacgttcggccaagggaccaagctggaaatcaaacgagcctccaccaagggcccatcggtcttccccctggcaccctcctccaagagcacctctgggggcacagcggccctgggctgcctggtcaaggactacttccccgaaccggtgacggtgtcgtggaactcaggcgccctgaccagcggcgtgcacaccttcccggctgtcctacagtcctcaggactctactccctcaaaagcgtggtgaccgtgccctccagcagcttgggcacccagacctacatctgcaacgtgaatcacaagcccagcaacaccaaggtggacaagaaagttgagcccaaatcttgt

SEQ ID NO: 154 - protein, 214 aa, synthetic construct; identical to SEQ ID NO: 4
  REGION 1..214: note = source = /note="Description of Artificial Sequence: Synthetic polypeptide"

SEQ ID NO: 155 - protein, 683 aa, synthetic construct
  REGION 1..683: note = source = /note="Description of Artificial Sequence: Synthetic polypeptide"
EVQLVESGGGLVQPGRSLRLSCAASGFTFDDYAMHWVRQAPGKGLEWVSAITWNSGHIDYADSVEGRFTISRDNAKNSLYLQMNSLRAEDTAVYYCAKVSYLSTASSLDYWGQGTLVTVSSASTKGPSVFPLAPSSKSTSGGTAALGCLVKDYFPEPVTVSWNSGALTSGVHTFPAVLQSSGLYSLKSVVTVPSSSLGTQTYICNVNHKPSNTKVDKKVEPKSCDKTHTCPPCPAPELLGGPSVFLFPPKPKDTLMISRTPEVTCVVVDVSHEDPEVKFNWYVDGVEVHNAKTKPCEEQYGSTYRCVSVLTVLHQDWLNGKEYKCKVSNKALPAPIEKTISKAKGQPREPQVYTLPPSREEMTKNQVSLTCLVKGFYPSDIAVEWESNGQPENNYKTTPPVLDSDGSFFLYSKLTVDKSRWQQGNVFSCSVMHEALHNHYTQKSLSLSPGGGGSGGGGSQVQLQESGPGLVKPSETLSLTCTVSGGSISSYFWSWIRQPPGKGLEWIGYIYYSGQTKYNPSLKSRVTISIDTSKNQFSLKLSSVTAADTAVYYCARETGSYYGFDYWGQGTLVTVSSTVAAPSVFIFPPSDEQLKSGTASVVCLLNNFYPREAKVQWKVDNALQSGNSQESVTEQDSKDSTYSLESTLTLSKADYEKHKVYACEVTHQGLSSPVTKSFNRGEC

SEQ ID NO: 156 - protein, 211 aa, synthetic construct
  REGION 1..211: note = source = /note="Description of Artificial Sequence: Synthetic polypeptide"
DIQMTQSPSSLSASVGDRVTITCRASQSINNYLNWYQQRPGKAPKLLIYAASSLQSGVPSRFSGSGSGTDFTLTISSLQPEDFATYYCQQSYSTPRTFGQGTKLEIKRASTKGPSVFPLAPSSKSTSGGTAALGCLVKDYFPEPVTVSWNSGALTSGVHTFPAVLQSSGLYSLKSVVTVPSSSLGTQTYICNVNHKPSNTKVDKKVEPKSC

SEQ ID NO: 157 - DNA, 642 bp, synthetic construct; identical to SEQ ID NO: 1
  misc_feature 1..642: note = source = /note="Description of Artificial Sequence: Synthetic polynucleotide"
  source 1..642: mol_type = other DNA

SEQ ID NO: 158 - DNA, 2070 bp, synthetic construct
  misc_feature 1..2070: note = source = /note="Description of Artificial Sequence: Synthetic polynucleotide"
  source 1..2070: mol_type = other DNA
gaggtacaactggtggaatcaggtggaggtttggtgcagccggggagatcgctcaggcttagctgtgcggcatcggggtttactttcgatgattatgcgatgcattgggtccggcaagcgcctggaaaagggctcgagtgggtttccgccattacgtggaatagcggacacatcgattatgcagacagtgtggagggcagattcacaatctcacgagacaatgctaagaacagcctgtaccttcagatgaactcacttcgcgcggaagataccgccgtatactactgcgccaaagtctcctacttgtctacagcttcgtcgctcgactattggggtcaaggaacgttggtcaccgtctctagtgcctccaccaagggcccatcggtcttccccctggcaccctcctccaagagcacctctgggggcacagcggccctgggctgcctggtcaaggactacttccccgaaccggtgacggtgtcgtggaactcaggcgccctgaccagcggcgtgcacaccttcccggctgtcctacagtcctcaggactctactccctcaaaagcgtggtgaccgtgccctccagcagcttgggcacccagacctacatctgcaacgtgaatcacaagcccagcaacaccaaggtggacaagaaagttgagcccaaatcttgtgacaaaactcacacatgcccaccgtgcccagcacctgaactcctggggggaccgtcagtcttcctcttccccccaaaacccaaggacaccctcatgatctcccggacccctgaggtcacatgcgtggtggtggacgtgagccacgaagaccctgaggtcaagttcaactggtacgtggacggcgtggaggtgcataatgccaagacaaagccgtgtgaggagcagtacggcagcacgtaccgttgtgtcagcgtcctcaccgtcctgcaccaggactggctgaatggcaaggagtacaagtgcaaggtctccaacaaagccctcccagcccccatcgagaaaaccatctccaaagccaaagggcagccccgagaaccacaggtgtacaccctgcccccatcccgggaggagatgaccaagaaccaggtcagcctgacctgcctggtcaaaggcttctatcccagcgacatcgccgtggagtgggagagcaatgggcagccggagaacaactacaagaccacgcctcccgtgctggactccgacggctccttcttcctctatagcaagctcaccgtggacaagagcaggtggcagcaggggaacgtcttctcatgctccgtgatgcatgaggctctgcacaaccactacacgcagaagagcctctccctgtctccgggtggtggcggatcgggaggtggcggatcccaggtacagttgcaggagtcaggtccaggactggtgaagccctcggagaccctctcactcacctgtaccatctccggggacagtgtctctaccaacagtgttgcttggaactggattaggcagcccccagggaaaggccttgagtggataggaaggacatactacaggtccaagtggtataatgattatgcagtttctctgaaaagtcgagtaaccatcagcccagacacatccaagaaccagttctccctgaagctgagctctgtgactgccgcggacacggctgtgtattactgtgcaagagaggatggggatagctactaccgctacggtatggacgtctggggccaagggaccacggtcaccgtctcctcaactgtggctgcaccatctgtcttcatcttcccgccatctgatgagcagttgaaatctggaactgcctctgttgtgtgcctgctgaataacttctatcccagagaggccaaagtacagtggaaggtggataacgccctccaatcgggtaactcccaggagagtgtcacagagcaggacagcaaggacagcacctacagcctcgaaagcaccctgacgctgagcaaagcagactacgagaaacacaaagtctacgcctgcgaagtcacccatcagggcctgagctcgcccgtcacaaagagcttcaacaggggagagtgt

SEQ ID NO: 159 - DNA, 651 bp, synthetic construct
  misc_feature 1..651: note = source = /note="Description of Artificial Sequence: Synthetic polynucleotide"
  source 1..651: mol_type = other DNA
gacatccagatgacccagtctccaagctccctgtctgcgtctgtgggcgatagggtcaccatcacttgcaggtccagccagagtgtgttatacagctccaacaataagaactacttagtttggtaccagcagaaaccaggaaaggttcctaaactgctcatttactgggcatctacccgggaatccggggtccctagtcgattcagtggcagcgggtctgggacagatttcactctcaccatcagcagcctgcagcctgaagatgtggcaacttattactgtcagcaatattataagactcctctcactttcggcggagggaccaaggtggagatcaaacgagcctccaccaagggcccatcggtcttccccctggcaccctcctccaagagcacctctgggggcacagcggccctgggctgcctggtcaaggactacttccccgaaccggtgacggtgtcgtggaactcaggcgccctgaccagcggcgtgcacaccttcccggctgtcctacagtcctcaggactctactccctcaaaagcgtggtgaccgtgccctccagcagcttgggcacccagacctacatctgcaacgtgaatcacaagcccagcaacaccaaggtggacaagaaagttgagcccaaatcttgt

SEQ ID NO: 160 - protein, 214 aa, synthetic construct; identical to SEQ ID NO: 4
  REGION 1..214: note = source = /note="Description of Artificial Sequence: Synthetic polypeptide"

SEQ ID NO: 161 - protein, 690 aa, synthetic construct
  REGION 1..690: note = source = /note="Description of Artificial Sequence: Synthetic polypeptide"
EVQLVESGGGLVQPGRSLRLSCAASGFTFDDYAMHWVRQAPGKGLEWVSAITWNSGHIDYADSVEGRFTISRDNAKNSLYLQMNSLRAEDTAVYYCAKVSYLSTASSLDYWGQGTLVTVSSASTKGPSVFPLAPSSKSTSGGTAALGCLVKDYFPEPVTVSWNSGALTSGVHTFPAVLQSSGLYSLKSVVTVPSSSLGTQTYICNVNHKPSNTKVDKKVEPKSCDKTHTCPPCPAPELLGGPSVFLFPPKPKDTLMISRTPEVTCVVVDVSHEDPEVKFNWYVDGVEVHNAKTKPCEEQYGSTYRCVSVLTVLHQDWLNGKEYKCKVSNKALPAPIEKTISKAKGQPREPQVYTLPPSREEMTKNQVSLTCLVKGFYPSDIAVEWESNGQPENNYKTTPPVLDSDGSFFLYSKLTVDKSRWQQGNVFSCSVMHEALHNHYTQKSLSLSPGGGGSGGGGSQVQLQESGPGLVKPSETLSLTCTISGDSVSTNSVAWNWIRQPPGKGLEWIGRTYYRSKWYNDYAVSLKSRVTISPDTSKNQFSLKLSSVTAADTAVYYCAREDGDSYYRYGMDVWGQGTTVTVSSTVAAPSVFIFPPSDEQLKSGTASVVCLLNNFYPREAKVQWKVDNALQSGNSQESVTEQDSKDSTYSLESTLTLSKADYEKHKVYACEVTHQGLSSPVTKSFNRGEC

SEQ ID NO: 162 - protein, 217 aa, synthetic construct
  REGION 1..217: note = source = /note="Description of Artificial Sequence: Synthetic polypeptide"
DIQMTQSPSSLSASVGDRVTITCRSSQSVLYSSNNKNYLVWYQQKPGKVPKLLIYWASTRESGVPSRFSGSGSGTDFTLTISSLQPEDVATYYCQQYYKTPLTFGGGTKVEIKRASTKGPSVFPLAPSSKSTSGGTAALGCLVKDYFPEPVTVSWNSGALTSGVHTFPAVLQSSGLYSLKSVVTVPSSSLGTQTYICNVNHKPSNTKVDKKVEPKSC

SEQ ID NO: 163 - DNA, 651 bp, synthetic construct; identical to SEQ ID NO: 19
  misc_feature 1..651: note = source = /note="Description of Artificial Sequence: Synthetic polynucleotide"
  source 1..651: mol_type = other DNA

SEQ ID NO: 164 - DNA, 2040 bp, synthetic construct
  misc_feature 1..2040: note = source = /note="Description of Artificial Sequence: Synthetic polynucleotide"
  source 1..2040: mol_type = other DNA
gaggtgcagctggtgcagtctggagcagaggtgaaaaagcccggggagtctctgaagatctcctgtaagacttctgaatacagctttaccagctactggatcggctgggtgcgccagatgcccgggaaaggcctggagtggatggggatcatctatcttggtgactcagataccagatacagcccgtccttccaaggccaggtcaccatctcagccgacaagtccatcagtaccgcctacctgcagtggagcagcctgaaggcctcggacaccgccatgtattactgtgcgagaagtaactggggtcttgactactggggccagggaaccctggtcaccgtctctagtgcctccaccaagggcccatcggtcttccccctggcaccctcctccaagagcacctctgggggcacagcggccctgggctgcctggtcaaggactacttccccgaaccggtgacggtgtcgtggaactcaggcgccctgaccagcggcgtgcacaccttcccggctgtcctacagtcctcaggactctactccctcaaaagcgtggtgaccgtgccctccagcagcttgggcacccagacctacatctgcaacgtgaatcacaagcccagcaacaccaaggtggacaagaaagttgagcccaaatcttgtgacaaaactcacacatgcccaccgtgcccagcacctgaactcctggggggaccgtcagtcttcctcttccccccaaaacccaaggacaccctcatgatctcccggacccctgaggtcacatgcgtggtggtggacgtgagccacgaagaccctgaggtcaagttcaactggtacgtggacggcgtggaggtgcataatgccaagacaaagccgtgtgaggagcagtacggcagcacgtaccgttgtgtcagcgtcctcaccgtcctgcaccaggactggctgaatggcaaggagtacaagtgcaaggtctccaacaaagccctcccagcccccatcgagaaaaccatctccaaagccaaagggcagccccgagaaccacaggtgtacaccctgcccccatcccgggaggagatgaccaagaaccaggtcagcctgacctgcctggtcaaaggcttctatcccagcgacatcgccgtggagtgggagagcaatgggcagccggagaacaactacaagaccacgcctcccgtgctggactccgacggctccttcttcctctatagcaagctcaccgtggacaagagcaggtggcagcaggggaacgtcttctcatgctccgtgatgcatgaggctctgcacaaccactacacgcagaagagcctctccctgtctccgggtggtggcggatcgggaggtggcggatcccaggtgcagttacagcagtcgggcgcaggactgttgaagccttcggagaccctgtccctcacctgcgctgtccatggtgggtccttcagtggttactactggaactggattcgccagccaccagggaaggggctagagtggattggggaaatcaatcatgctggaaacaccaactacaacccgtccctcaagagtcgagtcaccatatcattagacacgtccaagaaccagttctccctgacgctgacctctgtgaccgccgcggacacggctgtgtattactgtgcgagaggatattgtagaagtaccacctgctactttgactactggggccagggaaccctagtcaccgtctcctcaactgtggctgcaccatctgtcttcatcttcccgccatctgatgagcagttgaaatctggaactgcctctgttgtgtgcctgctgaataacttctatcccagagaggccaaagtacagtggaaggtggataacgccctccaatcgggtaactcccaggagagtgtcacagagcaggacagcaaggacagcacctacagcctcgaaagcaccctgacgctgagcaaagcagactacgagaaacacaaagtctacgcctgcgaagtcacccatcagggcctgagctcgcccgtcacaaagagcttcaacaggggagagtgt

SEQ ID NO: 165 - DNA, 633 bp, synthetic construct; identical to SEQ ID NO: 147
  misc_feature 1..633: note = source = /note="Description of Artificial Sequence: Synthetic polynucleotide"
  source 1..633: mol_type = other DNA

SEQ ID NO: 166 - protein, 217 aa, synthetic construct; identical to SEQ ID NO: 22
  REGION 1..217: note = source = /note="Description of Artificial Sequence: Synthetic polypeptide"

SEQ ID NO: 167 - protein, 680 aa, synthetic construct
  REGION 1..680: note = source = /note="Description of Artificial Sequence: Synthetic polypeptide"
EVQLVQSGAEVKKPGESLKISCKTSEYSFTSYWIGWVRQMPGKGLEWMGIIYLGDSDTRYSPSFQGQVTISADKSISTAYLQWSSLKASDTAMYYCARSNWGLDYWGQGTLVTVSSASTKGPSVFPLAPSSKSTSGGTAALGCLVKDYFPEPVTVSWNSGALTSGVHTFPAVLQSSGLYSLKSVVTVPSSSLGTQTYICNVNHKPSNTKVDKKVEPKSCDKTHTCPPCPAPELLGGPSVFLFPPKPKDTLMISRTPEVTCVVVDVSHEDPEVKFNWYVDGVEVHNAKTKPCEEQYGSTYRCVSVLTVLHQDWLNGKEYKCKVSNKALPAPIEKTISKAKGQPREPQVYTLPPSREEMTKNQVSLTCLVKGFYPSDIAVEWESNGQPENNYKTTPPVLDSDGSFFLYSKLTVDKSRWQQGNVFSCSVMHEALHNHYTQKSLSLSPGGGGSGGGGSQVQLQQSGAGLLKPSETLSLTCAVHGGSFSGYYWNWIRQPPGKGLEWIGEINHAGNTNYNPSLKSRVTISLDTSKNQFSLTLTSVTAADTAVYYCARGYCRSTTCYFDYWGQGTLVTVSSTVAAPSVFIFPPSDEQLKSGTASVVCLLNNFYPREAKVQWKVDNALQSGNSQESVTEQDSKDSTYSLESTLTLSKADYEKHKVYACEVTHQGLSSPVTKSFNRGEC

SEQ ID NO: 168 - protein, 211 aa, synthetic construct; identical to SEQ ID NO: 150
  REGION 1..211: note = source = /note="Description of Artificial Sequence: Synthetic polypeptide"

SEQ ID NO: 169 - DNA, 651 bp, synthetic construct; identical to SEQ ID NO: 19
  misc_feature 1..651: note = source = /note="Description of Artificial Sequence: Synthetic polynucleotide"
  source 1..651: mol_type = other DNA

SEQ ID NO: 170 - DNA, 2034 bp, synthetic construct
  misc_feature 1..2034: note = source = /note="Description of Artificial Sequence: Synthetic polynucleotide"
  source 1..2034: mol_type = other DNA
gaggtgcagctggtgcagtctggagcagaggtgaaaaagcccggggagtctctgaagatctcctgtaagacttctgaatacagctttaccagctactggatcggctgggtgcgccagatgcccgggaaaggcctggagtggatggggatcatctatcttggtgactcagataccagatacagcccgtccttccaaggccaggtcaccatctcagccgacaagtccatcagtaccgcctacctgcagtggagcagcctgaaggcctcggacaccgccatgtattactgtgcgagaagtaactggggtcttgactactggggccagggaaccctggtcaccgtctctagtgcctccaccaagggcccatcggtcttccccctggcaccctcctccaagagcacctctgggggcacagcggccctgggctgcctggtcaaggactacttccccgaaccggtgacggtgtcgtggaactcaggcgccctgaccagcggcgtgcacaccttcccggctgtcctacagtcctcaggactctactccctcaaaagcgtggtgaccgtgccctccagcagcttgggcacccagacctacatctgcaacgtgaatcacaagcccagcaacaccaaggtggacaagaaagttgagcccaaatcttgtgacaaaactcacacatgcccaccgtgcccagcacctgaactcctggggggaccgtcagtcttcctcttccccccaaaacccaaggacaccctcatgatctcccggacccctgaggtcacatgcgtggtggtggacgtgagccacgaagaccctgaggtcaagttcaactggtacgtggacggcgtggaggtgcataatgccaagacaaagccgtgtgaggagcagtacggcagcacgtaccgttgtgtcagcgtcctcaccgtcctgcaccaggactggctgaatggcaaggagtacaagtgcaaggtctccaacaaagccctcccagcccccatcgagaaaaccatctccaaagccaaagggcagccccgagaaccacaggtgtacaccctgcccccatcccgggaggagatgaccaagaaccaggtcagcctgacctgcctggtcaaaggcttctatcccagcgacatcgccgtggagtgggagagcaatgggcagccggagaacaactacaagaccacgcctcccgtgctggactccgacggctccttcttcctctatagcaagctcaccgtggacaagagcaggtggcagcaggggaacgtcttctcatgctccgtgatgcatgaggctctgcacaaccactacacgcagaagagcctctccctgtctccgggtggtggcggatcgggaggtggcggatcccaggtgcagctgcaggagtcgggcccaggactggtgaagccttcggagaccctgtccctcacctgcactgtctctggtggctccatcagtagttacttctggagctggattcggcagcccccaggtaagggactggagtggattggctatatctattacagtgggcagaccaaatacaacccctccctcaagagtcgagtcaccatatcaatagacacgtccaagaaccagttctccctgaagctgagctctgtgaccgctgcggacacggccgtgtattactgtgcgagagaaactgggagctactacggctttgactactggggccagggaaccctggtcaccgtctcctcaactgtggctgcaccatctgtcttcatcttcccgccatctgatgagcagttgaaatctggaactgcctctgttgtgtgcctgctgaataacttctatcccagagaggccaaagtacagtggaaggtggataacgccctccaatcgggtaactcccaggagagtgtcacagagcaggacagcaaggacagcacctacagcctcgaaagcaccctgacgctgagcaaagcagactacgagaaacacaaagtctacgcctgcgaagtcacccatcagggcctgagctcgcccgtcacaaagagcttcaacaggggagagtgt

SEQ ID NO: 171 - DNA, 633 bp, synthetic construct; identical to SEQ ID NO: 153
  misc_feature 1..633: note = source = /note="Description of Artificial Sequence: Synthetic polynucleotide"
  source 1..633: mol_type = other DNA

SEQ ID NO: 172 - protein, 217 aa, synthetic construct; identical to SEQ ID NO: 22
  REGION 1..217: note = source = /note="Description of Artificial Sequence: Synthetic polypeptide"

SEQ ID NO: 173 - protein, 678 aa, synthetic construct
  REGION 1..678: note = source = /note="Description of Artificial Sequence: Synthetic polypeptide"
EVQLVQSGAEVKKPGESLKISCKTSEYSFTSYWIGWVRQMPGKGLEWMGIIYLGDSDTRYSPSFQGQVTISADKSISTAYLQWSSLKASDTAMYYCARSNWGLDYWGQGTLVTVSSASTKGPSVFPLAPSSKSTSGGTAALGCLVKDYFPEPVTVSWNSGALTSGVHTFPAVLQSSGLYSLKSVVTVPSSSLGTQTYICNVNHKPSNTKVDKKVEPKSCDKTHTCPPCPAPELLGGPSVFLFPPKPKDTLMISRTPEVTCVVVDVSHEDPEVKFNWYVDGVEVHNAKTKPCEEQYGSTYRCVSVLTVLHQDWLNGKEYKCKVSNKALPAPIEKTISKAKGQPREPQVYTLPPSREEMTKNQVSLTCLVKGFYPSDIAVEWESNGQPENNYKTTPPVLDSDGSFFLYSKLTVDKSRWQQGNVFSCSVMHEALHNHYTQKSLSLSPGGGGSGGGGSQVQLQESGPGLVKPSETLSLTCTVSGGSISSYFWSWIRQPPGKGLEWIGYIYYSGQTKYNPSLKSRVTISIDTSKNQFSLKLSSVTAADTAVYYCARETGSYYGFDYWGQGTLVTVSSTVAAPSVFIFPPSDEQLKSGTASVVCLLNNFYPREAKVQWKVDNALQSGNSQESVTEQDSKDSTYSLESTLTLSKADYEKHKVYACEVTHQGLSSPVTKSFNRGEC

SEQ ID NO: 174 - protein, 211 aa, synthetic construct; identical to SEQ ID NO: 156
  REGION 1..211: note = source = /note="Description of Artificial Sequence: Synthetic polypeptide"

SEQ ID NO: 175 - DNA, 651 bp, synthetic construct; identical to SEQ ID NO: 19
  misc_feature 1..651: note = source = /note="Description of Artificial Sequence: Synthetic polynucleotide"
  source 1..651: mol_type = other DNA

SEQ ID NO: 176 - DNA, 2055 bp, synthetic construct
  misc_feature 1..2055: note = source = /note="Description of Artificial Sequence: Synthetic polynucleotide"
  source 1..2055: mol_type = other DNA
gaggtgcagctggtgcagtctggagcagaggtgaaaaagcccggggagtctctgaagatctcctgtaagacttctgaatacagctttaccagctactggatcggctgggtgcgccagatgcccgggaaaggcctggagtggatggggatcatctatcttggtgactcagataccagatacagcccgtccttccaaggccaggtcaccatctcagccgacaagtccatcagtaccgcctacctgcagtggagcagcctgaaggcctcggacaccgccatgtattactgtgcgagaagtaactggggtcttgactactggggccagggaaccctggtcaccgtctctagtgcctccaccaagggcccatcggtcttccccctggcaccctcctccaagagcacctctgggggcacagcggccctgggctgcctggtcaaggactacttccccgaaccggtgacggtgtcgtggaactcaggcgccctgaccagcggcgtgcacaccttcccggctgtcctacagtcctcaggactctactccctcaaaagcgtggtgaccgtgccctccagcagcttgggcacccagacctacatctgcaacgtgaatcacaagcccagcaacaccaaggtggacaagaaagttgagcccaaatcttgtgacaaaactcacacatgcccaccgtgcccagcacctgaactcctggggggaccgtcagtcttcctcttccccccaaaacccaaggacaccctcatgatctcccggacccctgaggtcacatgcgtggtggtggacgtgagccacgaagaccctgaggtcaagttcaactggtacgtggacggcgtggaggtgcataatgccaagacaaagccgtgtgaggagcagtacggcagcacgtaccgttgtgtcagcgtcctcaccgtcctgcaccaggactggctgaatggcaaggagtacaagtgcaaggtctccaacaaagccctcccagcccccatcgagaaaaccatctccaaagccaaagggcagccccgagaaccacaggtgtacaccctgcccccatcccgggaggagatgaccaagaaccaggtcagcctgacctgcctggtcaaaggcttctatcccagcgacatcgccgtggagtgggagagcaatgggcagccggagaacaactacaagaccacgcctcccgtgctggactccgacggctccttcttcctctatagcaagctcaccgtggacaagagcaggtggcagcaggggaacgtcttctcatgctccgtgatgcatgaggctctgcacaaccactacacgcagaagagcctctccctgtctccgggtggtggcggatcgggaggtggcggatcccaggtacagttgcaggagtcaggtccaggactggtgaagccctcggagaccctctcactcacctgtaccatctccggggacagtgtctctaccaacagtgttgcttggaactggattaggcagcccccagggaaaggccttgagtggataggaaggacatactacaggtccaagtggtataatgattatgcagtttctctgaaaagtcgagtaaccatcagcccagacacatccaagaaccagttctccctgaagctgagctctgtgactgccgcggacacggctgtgtattactgtgcaagagaggatggggatagctactaccgctacggtatggacgtctggggccaagggaccacggtcaccgtctcctcaactgtggctgcaccatctgtcttcatcttcccgccatctgatgagcagttgaaatctggaactgcctctgttgtgtgcctgctgaataacttctatcccagagaggccaaagtacagtggaaggtggataacgccctccaatcgggtaactcccaggagagtgtcacagagcaggacagcaaggacagcacctacagcctcgaaagcaccctgacgctgagcaaagcagactacgagaaacacaaagtctacgcctgcgaagtcacccatcagggcctgagctcgcccgtcacaaagagcttcaacaggggagagtgt

SEQ ID NO: 177 - DNA, 651 bp, synthetic construct; identical to SEQ ID NO: 159
  misc_feature 1..651: note = source = /note="Description of Artificial Sequence: Synthetic polynucleotide"
  source 1..651: mol_type = other DNA

SEQ ID NO: 178 - protein, 217 aa, synthetic construct; identical to SEQ ID NO: 22
  REGION 1..217: note = source = /note="Description of Artificial Sequence: Synthetic polypeptide"

SEQ ID NO: 179 - protein, 685 aa, synthetic construct
  REGION 1..685: note = source = /note="Description of Artificial Sequence: Synthetic polypeptide"
EVQLVQSGAEVKKPGESLKISCKTSEYSFTSYWIGWVRQMPGKGLEWMGIIYLGDSDTRYSPSFQGQVTISADKSISTAYLQWSSLKASDTAMYYCARSNWGLDYWGQGTLVTVSSASTKGPSVFPLAPSSKSTSGGTAALGCLVKDYFPEPVTVSWNSGALTSGVHTFPAVLQSSGLYSLKSVVTVPSSSLGTQTYICNVNHKPSNTKVDKKVEPKSCDKTHTCPPCPAPELLGGPSVFLFPPKPKDTLMISRTPEVTCVVVDVSHEDPEVKFNWYVDGVEVHNAKTKPCEEQYGSTYRCVSVLTVLHQDWLNGKEYKCKVSNKALPAPIEKTISKAKGQPREPQVYTLPPSREEMTKNQVSLTCLVKGFYPSDIAVEWESNGQPENNYKTTPPVLDSDGSFFLYSKLTVDKSRWQQGNVFSCSVMHEALHNHYTQKSLSLSPGGGGSGGGGSQVQLQESGPGLVKPSETLSLTCTISGDSVSTNSVAWNWIRQPPGKGLEWIGRTYYRSKWYNDYAVSLKSRVTISPDTSKNQFSLKLSSVTAADTAVYYCAREDGDSYYRYGMDVWGQGTTVTVSSTVAAPSVFIFPPSDEQLKSGTASVVCLLNNFYPREAKVQWKVDNALQSGNSQESVTEQDSKDSTYSLESTLTLSKADYEKHKVYACEVTHQGLSSPVTKSFNRGEC

SEQ ID NO: 180 - protein, 217 aa, synthetic construct; identical to SEQ ID NO: 162
  REGION 1..217: note = source = /note="Description of Artificial Sequence: Synthetic polypeptide"

SEQ ID NO: 181 - DNA, 642 bp, synthetic construct; identical to SEQ ID NO: 37
  misc_feature 1..642: note = source = /note="Description of Artificial Sequence: Synthetic polynucleotide"
  source 1..642: mol_type = other DNA

SEQ ID NO: 182 - DNA, 2055 bp, synthetic construct
  misc_feature 1..2055: note = source = /note="Description of Artificial Sequence: Synthetic polynucleotide"
  source 1..2055: mol_type = other DNA
caggtgcagttacagcagtcgggcgcaggactgttgaagccttcggagaccctgtccctcacctgcgctgtccatggtgggtccttcagtggttactactggaactggatccgccagccaccagggaaggggctagagtggattggggaaatcaatcatgctggaaacaccaactacaacccgtccctcaagagtcgagtcaccatatcattagacacgtccaagaaccagttctccctgacgctgacctctgtgaccgccgcggacacggctgtgtattactgtgcgagaggatattgtagaagtaccacctgctactttgactactggggccagggaaccctagtcaccgtctcctcagcctccaccaagggcccatcggtcttccccctggcaccctcctccaagagcacctctgggggcacagcggccctgggctgcctggtcaaggactacttccccgaaccggtgacggtgtcgtggaactcaggcgccctgaccagcggcgtgcacaccttcccggctgtcctacagtcctcaggactctactccctcaaaagcgtggtgaccgtgccctccagcagcttgggcacccagacctacatctgcaacgtgaatcacaagcccagcaacaccaaggtggacaagaaagttgagcccaaatcttgtgacaaaactcacacatgcccaccgtgcccagcacctgaactcctggggggaccgtcagtcttcctcttccccccaaaacccaaggacaccctcatgatctcccggacccctgaggtcacatgcgtggtggtggacgtgagccacgaagaccctgaggtcaagttcaactggtacgtggacggcgtggaggtgcataatgccaagacaaagccgtgtgaggagcagtacggcagcacgtaccgttgtgtcagcgtcctcaccgtcctgcaccaggactggctgaatggcaaggagtacaagtgcaaggtctccaacaaagccctcccagcccccatcgagaaaaccatctccaaagccaaagggcagccccgagaaccacaggtgtacaccctgcccccatcccgggaggagatgaccaagaaccaggtcagcctgacctgcctggtcaaaggcttctatcccagcgacatcgccgtggagtgggagagcaatgggcagccggagaacaactacaagaccacgcctcccgtgctggactccgacggctccttcttcctctatagcaagctcaccgtggacaagagcaggtggcagcaggggaacgtcttctcatgctccgtgatgcatgaggctctgcacaaccactacacgcagaagagcctctccctgtctccgggtggtggcggatcgggaggtggcggatccgaggtacaactggtggaatcaggtggaggtttggtgcagccggggagatcgctcaggcttagctgtgcggcatcggggtttactttcgatgattatgcgatgcattgggtccggcaagcgcctggaaaagggctcgagtgggtttccgccattacgtggaatagcggacacatcgattatgcagacagtgtggagggcagattcacaatctcacgagacaatgctaagaacagcctgtaccttcagatgaactcacttcgcgcggaagataccgccgtatactactgcgccaaagtctcctacttgtctacagcttcgtcgctcgactattggggtcaaggaacgttggtcaccgtctctagtactgtggctgcaccatctgtcttcatcttcccgccatctgatgagcagttgaaatctggaactgcctctgttgtgtgcctgctgaataacttctatcccagagaggccaaagtacagtggaaggtggataacgccctccaatcgggtaactcccaggagagtgtcacagagcaggacagcaaggacagcacctacagcctcgaaagcaccctgacgctgagcaaagcagactacgagaaacacaaagtctacgcctgcgaagtcacccatcagggcctgagctcgcccgtcacaaagagcttcaacaggggagagtgt

SEQ ID NO: 183 - DNA, 633 bp, synthetic construct
  misc_feature 1..633: note = source = /note="Description of Artificial Sequence: Synthetic polynucleotide"
  source 1..633: mol_type = other DNA
gatatccaaatgacacaatcaccatcgtcgctttcagcgtctgttggcgaccgtgtgacgattacctgtcgcgcgtcccagggaatccggaattacctcgcatggtatcagcaaaaacccggaaaagcaccgaagctcctgatctatgccgcctcgactcttcagagtggtgtgccgtcgaggtttagcgggtccgggtcaggtacggactttactctcacaatttccagcctgcagcccgaagatgtagctacctattactgccagagatacaaccgagcgccttacacattcggacaagggacaaaagtcgagatcaagcgtgcctccaccaagggcccatcggtcttccccctggcaccctcctccaagagcacctctgggggcacagcggccctgggctgcctggtcaaggactacttccccgaaccggtgacggtgtcgtggaactcaggcgccctgaccagcggcgtgcacaccttcccggctgtcctacagtcctcaggactctactccctcaaaagcgtggtgaccgtgccctccagcagcttgggcacccagacctacatctgcaacgtgaatcacaagcccagcaacaccaaggtggacaagaaagttgagcccaaatcttgt

SEQ ID NO: 184 - protein, 214 aa, synthetic construct; identical to SEQ ID NO: 40
  REGION 1..214: note = source = /note="Description of Artificial Sequence: Synthetic polypeptide"

SEQ ID NO: 185 - protein, 685 aa, synthetic construct
  REGION 1..685: note = source = /note="Description of Artificial Sequence: Synthetic polypeptide"
QVQLQQSGAGLLKPSETLSLTCAVHGGSFSGYYWNWIRQPPGKGLEWIGEINHAGNTNYNPSLKSRVTISLDTSKNQFSLTLTSVTAADTAVYYCARGYCRSTTCYFDYWGQGTLVTVSSASTKGPSVFPLAPSSKSTSGGTAALGCLVKDYFPEPVTVSWNSGALTSGVHTFPAVLQSSGLYSLKSVVTVPSSSLGTQTYICNVNHKPSNTKVDKKVEPKSCDKTHTCPPCPAPELLGGPSVFLFPPKPKDTLMISRTPEVTCVVVDVSHEDPEVKFNWYVDGVEVHNAKTKPCEEQYGSTYRCVSVLTVLHQDWLNGKEYKCKVSNKALPAPIEKTISKAKGQPREPQVYTLPPSREEMTKNQVSLTCLVKGFYPSDIAVEWESNGQPENNYKTTPPVLDSDGSFFLYSKLTVDKSRWQQGNVFSCSVMHEALHNHYTQKSLSLSPGGGGSGGGGSEVQLVESGGGLVQPGRSLRLSCAASGFTFDDYAMHWVRQAPGKGLEWVSAITWNSGHIDYADSVEGRFTISRDNAKNSLYLQMNSLRAEDTAVYYCAKVSYLSTASSLDYWGQGTLVTVSSTVAAPSVFIFPPSDEQLKSGTASVVCLLNNFYPREAKVQWKVDNALQSGNSQESVTEQDSKDSTYSLESTLTLSKADYEKHKVYACEVTHQGLSSPVTKSFNRGEC

SEQ ID NO: 186 - protein, 211 aa, synthetic construct
  REGION 1..211: note = source = /note="Description of Artificial Sequence: Synthetic polypeptide"
DIQMTQSPSSLSASVGDRVTITCRASQGIRNYLAWYQQKPGKAPKLLIYAASTLQSGVPSRFSGSGSGTDFTLTISSLQPEDVATYYCQRYNRAPYTFGQGTKVEIKRASTKGPSVFPLAPSSKSTSGGTAALGCLVKDYFPEPVTVSWNSGALTSGVHTFPAVLQSSGLYSLKSVVTVPSSSLGTQTYICNVNHKPSNTKVDKKVEPKSC

SEQ ID NO: 187 - DNA, 642 bp, synthetic construct; identical to SEQ ID NO: 37
  misc_feature 1..642: note = source = /note="Description of Artificial Sequence: Synthetic polynucleotide"
  source 1..642: mol_type = other DNA

SEQ ID NO: 188 - DNA, 2037 bp, synthetic construct
  misc_feature 1..2037: note = source = /note="Description of Artificial Sequence: Synthetic polynucleotide"
  source 1..2037: mol_type = other DNA
caggtgcagttacagcagtcgggcgcaggactgttgaagccttcggagaccctgtccctcacctgcgctgtccatggtgggtccttcagtggttactactggaactggatccgccagccaccagggaaggggctagagtggattggggaaatcaatcatgctggaaacaccaactacaacccgtccctcaagagtcgagtcaccatatcattagacacgtccaagaaccagttctccctgacgctgacctctgtgaccgccgcggacacggctgtgtattactgtgcgagaggatattgtagaagtaccacctgctactttgactactggggccagggaaccctagtcaccgtctcctcagcctccaccaagggcccatcggtcttccccctggcaccctcctccaagagcacctctgggggcacagcggccctgggctgcctggtcaaggactacttccccgaaccggtgacggtgtcgtggaactcaggcgccctgaccagcggcgtgcacaccttcccggctgtcctacagtcctcaggactctactccctcaaaagcgtggtgaccgtgccctccagcagcttgggcacccagacctacatctgcaacgtgaatcacaagcccagcaacaccaaggtggacaagaaagttgagcccaaatcttgtgacaaaactcacacatgcccaccgtgcccagcacctgaactcctggggggaccgtcagtcttcctcttccccccaaaacccaaggacaccctcatgatctcccggacccctgaggtcacatgcgtggtggtggacgtgagccacgaagaccctgaggtcaagttcaactggtacgtggacggcgtggaggtgcataatgccaagacaaagccgtgtgaggagcagtacggcagcacgtaccgttgtgtcagcgtcctcaccgtcctgcaccaggactggctgaatggcaaggagtacaagtgcaaggtctccaacaaagccctcccagcccccatcgagaaaaccatctccaaagccaaagggcagccccgagaaccacaggtgtacaccctgcccccatcccgggaggagatgaccaagaaccaggtcagcctgacctgcctggtcaaaggcttctatcccagcgacatcgccgtggagtgggagagcaatgggcagccggagaacaactacaagaccacgcctcccgtgctggactccgacggctccttcttcctctatagcaagctcaccgtggacaagagcaggtggcagcaggggaacgtcttctcatgctccgtgatgcatgaggctctgcacaaccactacacgcagaagagcctctccctgtctccgggtggtggcggatcgggaggtggcggatccgaggtgcagctggtgcagtctggagcagaggtgaaaaagcccggggagtctctgaagatctcctgtaagacttctgaatacagctttaccagctactggatcggctgggtgcgccagatgcccgggaaaggcctggagtggatggggatcatctatcttggtgactcagataccagatacagcccgtccttccaaggccaggtcaccatctcagccgacaagtccatcagtaccgcctacctgcagtggagcagcctgaaggcctcggacaccgccatgtattactgtgcgagaagtaactggggtcttgactactggggccagggaaccctggtcaccgtctctagtcagcccaaggccaaccccactgtcactctgttcccgccctcctctgaggagctccaagccaacaaggccacactagtgtgtctgatcagtgacttctacccgggagctgtgacagtggcctggaaggcagatggcagccccgtcaaggcgggagtggagaccaccaaaccctccaaacagagcaacaacaagtacgcggccgagagctacctgagcctgacgcccgagcagtggaagtcccacagaagctacagctgccaggtcacgcatgaagggagcaccgtggagaagacagtggcccctacagaatgttca

SEQ ID NO: 189 - DNA, 645 bp, synthetic construct
  misc_feature 1..645: note = source = /note="Description of Artificial Sequence: Synthetic polynucleotide"
  source 1..645: mol_type = other DNA
cagtctgtgctgacgcagccgccctcagtgtctggggccccagggcagagggtcaccatctcctgcactgggagcagttccaacatcggggcaggttatgatgtacactggtaccagcagtttccaggaacagcccccaaactcctcatccaaggtaacagcaatcggccctcaggggtccctgaccgattctctggctccaagtctggcacctcagcctccctggccatcactgggctccaggctgaggatgaggctgattattactgccagtcctatgacagcagcctgagtggttcggtgttcggcggagggaccaagctgaccgtcctaggtgcctccaccaagggcccatcggtcttccccctggcaccctcctccaagagcacctctgggggcacagcggccctgggctgcctggtcaaggactacttccccgaaccggtgacggtgtcgtggaactcaggcgccctgaccagcggcgtgcacaccttcccggctgtcctacagtcctcaggactctactccctcaaaagcgtggtgaccgtgccctccagcagcttgggcacccagacctacatctgcaacgtgaatcacaagcccagcaacaccaaggtggacaagaaagttgagcccaaatcttgt

SEQ ID NO: 190 - protein, 214 aa, synthetic construct; identical to SEQ ID NO: 40
  REGION 1..214: note = source = /note="Description of Artificial Sequence: Synthetic polypeptide"

SEQ ID NO: 191 - protein, 679 aa, synthetic construct
  REGION 1..679: note = source = /note="Description of Artificial Sequence: Synthetic polypeptide"
QVQLQQSGAGLLKPSETLSLTCAVHGGSFSGYYWNWIRQPPGKGLEWIGEINHAGNTNYNPSLKSRVTISLDTSKNQFSLTLTSVTAADTAVYYCARGYCRSTTCYFDYWGQGTLVTVSSASTKGPSVFPLAPSSKSTSGGTAALGCLVKDYFPEPVTVSWNSGALTSGVHTFPAVLQSSGLYSLKSVVTVPSSSLGTQTYICNVNHKPSNTKVDKKVEPKSCDKTHTCPPCPAPELLGGPSVFLFPPKPKDTLMISRTPEVTCVVVDVSHEDPEVKFNWYVDGVEVHNAKTKPCEEQYGSTYRCVSVLTVLHQDWLNGKEYKCKVSNKALPAPIEKTISKAKGQPREPQVYTLPPSREEMTKNQVSLTCLVKGFYPSDIAVEWESNGQPENNYKTTPPVLDSDGSFFLYSKLTVDKSRWQQGNVFSCSVMHEALHNHYTQKSLSLSPGGGGSGGGGSEVQLVQSGAEVKKPGESLKISCKTSEYSFTSYWIGWVRQMPGKGLEWMGIIYLGDSDTRYSPSFQGQVTISADKSISTAYLQWSSLKASDTAMYYCARSNWGLDYWGQGTLVTVSSQPKANPTVTLFPPSSEELQANKATLVCLISDFYPGAVTVAWKADGSPVKAGVETTKPSKQSNNKYAAESYLSLTPEQWKSHRSYSCQVTHEGSTVEKTVAPTECS

SEQ ID NO: 192 - protein, 215 aa, synthetic construct
  REGION 1..215: note = source = /note="Description of Artificial Sequence: Synthetic polypeptide"
QSVLTQPPSVSGAPGQRVTISCTGSSSNIGAGYDVHWYQQFPGTAPKLLIQGNSNRPSGVPDRFSGSKSGTSASLAITGLQAEDEADYYCQSYDSSLSGSVFGGGTKLTVLGASTKGPSVFPLAPSSKSTSGGTAALGCLVKDYFPEPVTVSWNSGALTSGVHTFPAVLQSSGLYSLKSVVTVPSSSLGTQTYICNVNHKPSNTKVDKKVEPKSC

SEQ ID NO: 193 - DNA, 642 bp, synthetic construct; identical to SEQ ID NO: 49
  misc_feature 1..642: note = source = /note="Description of Artificial Sequence: Synthetic polynucleotide"
  source 1..642: mol_type = other DNA

SEQ ID NO: 194 - DNA, 2049 bp, synthetic construct
  misc_feature 1..2049: note = source = /note="Description of Artificial Sequence: Synthetic polynucleotide"
  source 1..2049: mol_type = other DNA
caggtgcagctgcaggagtcgggcccaggactggtgaagccttcggagaccctgtccctcacctgcactgtctctggtggctccatcagtagttacttctggagctggatccggcagcccccaggtaagggactggagtggattggctatatctattacagtgggcagaccaaatacaacccctccctcaagagtcgagtcaccatatcaatagacacgtccaagaaccagttctccctgaagctgagctctgtgaccgctgcggacacggccgtgtattactgtgcgagagaaactgggagctactacggctttgactactggggccagggaaccctggtcaccgtctcctcagcctccaccaagggcccatcggtcttccccctggcaccctcctccaagagcacctctgggggcacagcggccctgggctgcctggtcaaggactacttccccgaaccggtgacggtgtcgtggaactcaggcgccctgaccagcggcgtgcacaccttcccggctgtcctacagtcctcaggactctactccctcaaaagcgtggtgaccgtgccctccagcagcttgggcacccagacctacatctgcaacgtgaatcacaagcccagcaacaccaaggtggacaagaaagttgagcccaaatcttgtgacaaaactcacacatgcccaccgtgcccagcacctgaactcctggggggaccgtcagtcttcctcttccccccaaaacccaaggacaccctcatgatctcccggacccctgaggtcacatgcgtggtggtggacgtgagccacgaagaccctgaggtcaagttcaactggtacgtggacggcgtggaggtgcataatgccaagacaaagccgtgtgaggagcagtacggcagcacgtaccgttgtgtcagcgtcctcaccgtcctgcaccaggactggctgaatggcaaggagtacaagtgcaaggtctccaacaaagccctcccagcccccatcgagaaaaccatctccaaagccaaagggcagccccgagaaccacaggtgtacaccctgcccccatcccgggaggagatgaccaagaaccaggtcagcctgacctgcctggtcaaaggcttctatcccagcgacatcgccgtggagtgggagagcaatgggcagccggagaacaactacaagaccacgcctcccgtgctggactccgacggctccttcttcctctatagcaagctcaccgtggacaagagcaggtggcagcaggggaacgtcttctcatgctccgtgatgcatgaggctctgcacaaccactacacgcagaagagcctctccctgtctccgggtggtggcggatcgggaggtggcggatccgaggtacaactggtggaatcaggtggaggtttggtgcagccggggagatcgctcaggcttagctgtgcggcatcggggtttactttcgatgattatgcgatgcattgggtccggcaagcgcctggaaaagggctcgagtgggtttccgccattacgtggaatagcggacacatcgattatgcagacagtgtggagggcagattcacaatctcacgagacaatgctaagaacagcctgtaccttcagatgaactcacttcgcgcggaagataccgccgtatactactgcgccaaagtctcctacttgtctacagcttcgtcgctcgactattggggtcaaggaacgttggtcaccgtctctagtactgtggctgcaccatctgtcttcatcttcccgccatctgatgagcagttgaaatctggaactgcctctgttgtgtgcctgctgaataacttctatcccagagaggccaaagtacagtggaaggtggataacgccctccaatcgggtaactcccaggagagtgtcacagagcaggacagcaaggacagcacctacagcctcgaaagcaccctgacgctgagcaaagcagactacgagaaacacaaagtctacgcctgcgaagtcacccatcagggcctgagctcgcccgtcacaaagagcttcaacaggggagagtgt

SEQ ID NO: 195 - DNA, 633 bp, synthetic construct; identical to SEQ ID NO: 183
  misc_feature 1..633: note = source = /note="Description of Artificial Sequence: Synthetic polynucleotide"
  source 1..633: mol_type = other DNA

SEQ ID NO: 196 - protein, 214 aa, synthetic construct; identical to SEQ ID NO: 52
  REGION 1..214: note = source = /note="Description of Artificial Sequence: Synthetic polypeptide"

SEQ ID NO: 197 - protein, 683 aa, synthetic construct
  REGION 1..683: note = source = /note="Description of Artificial Sequence: Synthetic polypeptide"
QVQLQESGPGLVKPSETLSLTCTVSGGSISSYFWSWIRQPPGKGLEWIGYIYYSGQTKYNPSLKSRVTISIDTSKNQFSLKLSSVTAADTAVYYCARETGSYYGFDYWGQGTLVTVSSASTKGPSVFPLAPSSKSTSGGTAALGCLVKDYFPEPVTVSWNSGALTSGVHTFPAVLQSSGLYSLKSVVTVPSSSLGTQTYICNVNHKPSNTKVDKKVEPKSCDKTHTCPPCPAPELLGGPSVFLFPPKPKDTLMISRTPEVTCVVVDVSHEDPEVKFNWYVDGVEVHNAKTKPCEEQYGSTYRCVSVLTVLHQDWLNGKEYKCKVSNKALPAPIEKTISKAKGQPREPQVYTLPPSREEMTKNQVSLTCLVKGFYPSDIAVEWESNGQPENNYKTTPPVLDSDGSFFLYSKLTVDKSRWQQGNVFSCSVMHEALHNHYTQKSLSLSPGGGGSGGGGSEVQLVESGGGLVQPGRSLRLSCAASGFTFDDYAMHWVRQAPGKGLEWVSAITWNSGHIDYADSVEGRFTISRDNAKNSLYLQMNSLRAEDTAVYYCAKVSYLSTASSLDYWGQGTLVTVSSTVAAPSVFIFPPSDEQLKSGTASVVCLLNNFYPREAKVQWKVDNALQSGNSQESVTEQDSKDSTYSLESTLTLSKADYEKHKVYACEVTHQGLSSPVTKSFNRGEC

SEQ ID NO: 198 - protein, 211 aa, synthetic construct; identical to SEQ ID NO: 186
  REGION 1..211: note = source = /note="Description of Artificial Sequence: Synthetic polypeptide"

SEQ ID NO: 199 - DNA, 642 bp, synthetic construct; identical to SEQ ID NO: 49
  misc_feature 1..642: note = source = /note="Description of Artificial Sequence: Synthetic polynucleotide"
  source 1..642: mol_type = other DNA

SEQ ID NO: 200 - DNA, 2031 bp, synthetic construct
  misc_feature 1..2031: note = source = /note="Description of Artificial Sequence: Synthetic polynucleotide"
  source 1..2031: mol_type = other DNA
caggtgcagctgcaggagtcgggcccaggactggtgaagccttcggagaccctgtccctcacctgcactgtctctggtggctccatcagtagttacttctggagctggatccggcagcccccaggtaagggactggagtggattggctatatctattacagtgggcagaccaaatacaacccctccctcaagagtcgagtcaccatatcaatagacacgtccaagaaccagttctccctgaagctgagctctgtgaccgctgcggacacggccgtgtattactgtgcgagagaaactgggagctactacggctttgactactggggccagggaaccctggtcaccgtctcctcagcctccaccaagggcccatcggtcttccccctggcaccctcctccaagagcacctctgggggcacagcggccctgggctgcctggtcaaggactacttccccgaaccggtgacggtgtcgtggaactcaggcgccctgaccagcggcgtgcacaccttcccggctgtcctacagtcctcaggactctactccctcaaaagcgtggtgaccgtgccctccagcagcttgggcacccagacctacatctgcaacgtgaatcacaagcccagcaacaccaaggtggacaagaaagttgagcccaaatcttgtgacaaaactcacacatgcccaccgtgcccagcacctgaactcctggggggaccgtcagtcttcctcttccccccaaaacccaaggacaccctcatgatctcccggacccctgaggtcacatgcgtggtggtggacgtgagccacgaagaccctgaggtcaagttcaactggtacgtggacggcgtggaggtgcataatgccaagacaaagccgtgtgaggagcagtacggcagcacgtaccgttgtgtcagcgtcctcaccgtcctgcaccaggactggctgaatggcaaggagtacaagtgcaaggtctccaacaaagccctcccagcccccatcgagaaaaccatctccaaagccaaagggcagccccgagaaccacaggtgtacaccctgcccccatcccgggaggagatgaccaagaaccaggtcagcctgacctgcctggtcaaaggcttctatcccagcgacatcgccgtggagtgggagagcaatgggcagccggagaacaactacaagaccacgcctcccgtgctggactccgacggctccttcttcctctatagcaagctcaccgtggacaagagcaggtggcagcaggggaacgtcttctcatgctccgtgatgcatgaggctctgcacaaccactacacgcagaagagcctctccctgtctccgggtggtggcggatcgggaggtggcggatccgaggtgcagctggtgcagtctggagcagaggtgaaaaagcccggggagtctctgaagatctcctgtaagacttctgaatacagctttaccagctactggatcggctgggtgcgccagatgcccgggaaaggcctggagtggatggggatcatctatcttggtgactcagataccagatacagcccgtccttccaaggccaggtcaccatctcagccgacaagtccatcagtaccgcctacctgcagtggagcagcctgaaggcctcggacaccgccatgtattactgtgcgagaagtaactggggtcttgactactggggccagggaaccctggtcaccgtctctagtcagcccaaggccaaccccactgtcactctgttcccgccctcctctgaggagctccaagccaacaaggccacactagtgtgtctgatcagtgacttctacccgggagctgtgacagtggcctggaaggcagatggcagccccgtcaaggcgggagtggagaccaccaaaccctccaaacagagcaacaacaagtacgcggccgagagctacctgagcctgacgcccgagcagtggaagtcccacagaagctacagctgccaggtcacgcatgaagggagcaccgtggagaagacagtggcccctacagaatgttca

SEQ ID NO: 201 - DNA, 645 bp, synthetic construct; identical to SEQ ID NO: 189
  misc_feature 1..645: note = source = /note="Description of Artificial Sequence: Synthetic polynucleotide"
  source 1..645: mol_type = other DNA

SEQ ID NO: 202 - protein, 214 aa, synthetic construct; identical to SEQ ID NO: 52
  REGION 1..214: note = source = /note="Description of Artificial Sequence: Synthetic polypeptide"

SEQ ID NO: 203 - protein, 677 aa, synthetic construct
  REGION 1..677: note = source = /note="Description of Artificial Sequence: Synthetic polypeptide"
QVQLQESGPGLVKPSETLSLTCTVSGGSISSYFWSWIRQPPGKGLEWIGYIYYSGQTKYNPSLKSRVTISIDTSKNQFSLKLSSVTAADTAVYYCARETGSYYGFDYWGQGTLVTVSSASTKGPSVFPLAPSSKSTSGGTAALGCLVKDYFPEPVTVSWNSGALTSGVHTFPAVLQSSGLYSLKSVVTVPSSSLGTQTYICNVNHKPSNTKVDKKVEPKSCDKTHTCPPCPAPELLGGPSVFLFPPKPKDTLMISRTPEVTCVVVDVSHEDPEVKFNWYVDGVEVHNAKTKPCEEQYGSTYRCVSVLTVLHQDWLNGKEYKCKVSNKALPAPIEKTISKAKGQPREPQVYTLPPSREEMTKNQVSLTCLVKGFYPSDIAVEWESNGQPENNYKTTPPVLDSDGSFFLYSKLTVDKSRWQQGNVFSCSVMHEALHNHYTQKSLSLSPGGGGSGGGGSEVQLVQSGAEVKKPGESLKISCKTSEYSFTSYWIGWVRQMPGKGLEWMGIIYLGDSDTRYSPSFQGQVTISADKSISTAYLQWSSLKASDTAMYYCARSNWGLDYWGQGTLVTVSSQPKANPTVTLFPPSSEELQANKATLVCLISDFYPGAVTVAWKADGSPVKAGVETTKPSKQSNNKYAAESYLSLTPEQWKSHRSYSCQVTHEGSTVEKTVAPTECS

SEQ ID NO: 204 - protein, 215 aa, synthetic construct; identical to SEQ ID NO: 192
  REGION 1..215: note = source = /note="Description of Artificial Sequence: Synthetic polypeptide"

SEQ ID NO: 205 - DNA, 660 bp, synthetic construct; identical to SEQ ID NO: 61
  misc_feature 1..660: note = source = /note="Description of Artificial Sequence: Synthetic polynucleotide"
  source 1..660: mol_type = other DNA

SEQ ID NO: 206 - DNA, 2070 bp, synthetic construct
  misc_feature 1..2070: note = source = /note="Description of Artificial Sequence: Synthetic polynucleotide"
  source 1..2070: mol_type = other DNA
caggtacagttgcaggagtcaggtccaggactggtgaagccctcggagaccctctcactcacctgtaccatctccggggacagtgtctctaccaacagtgttgcttggaactggatcaggcagcccccagggaaaggccttgagtggataggaaggacatactacaggtccaagtggtataatgattatgcagtttctctgaaaagtcgagtaaccatcagcccagacacatccaagaaccagttctccctgaagctgagctctgtgactgccgcggacacggctgtgtattactgtgcaagagaggatggggatagctactaccgctacggtatggacgtctggggccaagggaccacggtcaccgtctcctcagcctccaccaagggcccatcggtcttccccctggcaccctcctccaagagcacctctgggggcacagcggccctgggctgcctggtcaaggactacttccccgaaccggtgacggtgtcgtggaactcaggcgccctgaccagcggcgtgcacaccttcccggctgtcctacagtcctcaggactctactccctcaaaagcgtggtgaccgtgccctccagcagcttgggcacccagacctacatctgcaacgtgaatcacaagcccagcaacaccaaggtggacaagaaagttgagcccaaatcttgtgacaaaactcacacatgcccaccgtgcccagcacctgaactcctggggggaccgtcagtcttcctcttccccccaaaacccaaggacaccctcatgatctcccggacccctgaggtcacatgcgtggtggtggacgtgagccacgaagaccctgaggtcaagttcaactggtacgtggacggcgtggaggtgcataatgccaagacaaagccgtgtgaggagcagtacggcagcacgtaccgttgtgtcagcgtcctcaccgtcctgcaccaggactggctgaatggcaaggagtacaagtgcaaggtctccaacaaagccctcccagcccccatcgagaaaaccatctccaaagccaaagggcagccccgagaaccacaggtgtacaccctgcccccatcccgggaggagatgaccaagaaccaggtcagcctgacctgcctggtcaaaggcttctatcccagcgacatcgccgtggagtgggagagcaatgggcagccggagaacaactacaagaccacgcctcccgtgctggactccgacggctccttcttcctctatagcaagctcaccgtggacaagagcaggtggcagcaggggaacgtcttctcatgctccgtgatgcatgaggctctgcacaaccactacacgcagaagagcctctccctgtctccgggtggtggcggatcgggaggtggcggatccgaggtacaactggtggaatcaggtggaggtttggtgcagccggggagatcgctcaggcttagctgtgcggcatcggggtttactttcgatgattatgcgatgcattgggtccggcaagcgcctggaaaagggctcgagtgggtttccgccattacgtggaatagcggacacatcgattatgcagacagtgtggagggcagattcacaatctcacgagacaatgctaagaacagcctgtaccttcagatgaactcacttcgcgcggaagataccgccgtatactactgcgccaaagtctcctacttgtctacagcttcgtcgctcgactattggggtcaaggaacgttggtcaccgtctctagtactgtggctgcaccatctgtcttcatcttcccgccatctgatgagcagttgaaatctggaactgcctctgttgtgtgcctgctgaataacttctatcccagagaggccaaagtacagtggaaggtggataacgccctccaatcgggtaactcccaggagagtgtcacagagcaggacagcaaggacagcacctacagcctcgaaagcaccctgacgctgagcaaagcagactacgagaaacacaaagtctacgcctgcgaagtcacccatcagggcctgagctcgcccgtcacaaagagcttcaacaggggagagtgt

SEQ ID NO: 207 - DNA, 633 bp, synthetic construct; identical to SEQ ID NO: 183
  misc_feature 1..633: note = source = /note="Description of Artificial Sequence: Synthetic polynucleotide"
  source 1..633: mol_type = other DNA

SEQ ID NO: 208 - protein, 220 aa, synthetic construct; identical to SEQ ID NO: 64
  REGION 1..220: note = source = /note="Description of Artificial Sequence: Synthetic polypeptide"

SEQ ID NO: 209 - protein, 690 aa, synthetic construct
  REGION 1..690: note = source = /note="Description of Artificial Sequence: Synthetic polypeptide"
QVQLQESGPGLVKPSETLSLTCTISGDSVSTNSVAWNWIRQPPGKGLEWIGRTYYRSKWYNDYAVSLKSRVTISPDTSKNQFSLKLSSVTAADTAVYYCAREDGDSYYRYGMDVWGQGTTVTVSSASTKGPSVFPLAPSSKSTSGGTAALGCLVKDYFPEPVTVSWNSGALTSGVHTFPAVLQSSGLYSLKSVVTVPSSSLGTQTYICNVNHKPSNTKVDKKVEPKSCDKTHTCPPCPAPELLGGPSVFLFPPKPKDTLMISRTPEVTCVVVDVSHEDPEVKFNWYVDGVEVHNAKTKPCEEQYGSTYRCVSVLTVLHQDWLNGKEYKCKVSNKALPAPIEKTISKAKGQPREPQVYTLPPSREEMTKNQVSLTCLVKGFYPSDIAVEWESNGQPENNYKTTPPVLDSDGSFFLYSKLTVDKSRWQQGNVFSCSVMHEALHNHYTQKSLSLSPGGGGSGGGGSEVQLVESGGGLVQPGRSLRLSCAASGFTFDDYAMHWVRQAPGKGLEWVSAITWNSGHIDYADSVEGRFTISRDNAKNSLYLQMNSLRAEDTAVYYCAKVSYLSTASSLDYWGQGTLVTVSSTVAAPSVFIFPPSDEQLKSGTASVVCLLNNFYPREAKVQWKVDNALQSGNSQESVTEQDSKDSTYSLESTLTLSKADYEKHKVYACEVTHQGLSSPVTKSFNRGEC

SEQ ID NO: 210 - protein, 211 aa, synthetic construct; identical to SEQ ID NO: 186
  REGION 1..211: note = source = /note="Description of Artificial Sequence: Synthetic polypeptide"

SEQ ID NO: 211 - DNA, 660 bp, synthetic construct; identical to SEQ ID NO: 61
  misc_feature 1..660: note = source = /note="Description of Artificial Sequence: Synthetic polynucleotide"
  source 1..660: mol_type = other DNA

SEQ ID NO: 212 - DNA, 2052 bp, synthetic construct
  misc_feature 1..2052: note = source = /note="Description of Artificial Sequence: Synthetic polynucleotide"
  source 1..2052: mol_type = other DNA
caggtacagttgcaggagtcaggtccaggactggtgaagccctcggagaccctctcactcacctgtaccatctccggggacagtgtctctaccaacagtgttgcttggaactggatcaggcagcccccagggaaaggccttgagtggataggaaggacatactacaggtccaagtggtataatgattatgcagtttctctgaaaagtcgagtaaccatcagcccagacacatccaagaaccagttctccctgaagctgagctctgtgactgccgcggacacggctgtgtattactgtgcaagagaggatggggatagctactaccgctacggtatggacgtctggggccaagggaccacggtcaccgtctcctcagcctccaccaagggcccatcggtcttccccctggcaccctcctccaagagcacctctgggggcacagcggccctgggctgcctggtcaaggactacttccccgaaccggtgacggtgtcgtggaactcaggcgccctgaccagcggcgtgcacaccttcccggctgtcctacagtcctcaggactctactccctcaaaagcgtggtgaccgtgccctccagcagcttgggcacccagacctacatctgcaacgtgaatcacaagcccagcaacaccaaggtggacaagaaagttgagcccaaatcttgtgacaaaactcacacatgcccaccgtgcccagcacctgaactcctggggggaccgtcagtcttcctcttccccccaaaacccaaggacaccctcatgatctcccggacccctgaggtcacatgcgtggtggtggacgtgagccacgaagaccctgaggtcaagttcaactggtacgtggacggcgtggaggtgcataatgccaagacaaagccgtgtgaggagcagtacggcagcacgtaccgttgtgtcagcgtcctcaccgtcctgcaccaggactggctgaatggcaaggagtacaagtgcaaggtctccaacaaagccctcccagcccccatcgagaaaaccatctccaaagccaaagggcagccccgagaaccacaggtgtacaccctgcccccatcccgggaggagatgaccaagaaccaggtcagcctgacctgcctggtcaaaggcttctatcccagcgacatcgccgtggagtgggagagcaatgggcagccggagaacaactacaagaccacgcctcccgtgctggactccgacggctccttcttcctctatagcaagctcaccgtggacaagagcaggtggcagcaggggaacgtcttctcatgctccgtgatgcatgaggctctgcacaaccactacacgcagaagagcctctccctgtctccgggtggtggcggatcgggaggtggcggatccgaggtgcagctggtgcagtctggagcagaggtgaaaaagcccggggagtctctgaagatctcctgtaagacttctgaatacagctttaccagctactggatcggctgggtgcgccagatgcccgggaaaggcctggagtggatggggatcatctatcttggtgactcagataccagatacagcccgtccttccaaggccaggtcaccatctcagccgacaagtccatcagtaccgcctacctgcagtggagcagcctgaaggcctcggacaccgccatgtattactgtgcgagaagtaactggggtcttgactactggggccagggaaccctggtcaccgtctctagtcagcccaaggccaaccccactgtcactctgttcccgccctcctctgaggagctccaagccaacaaggccacactagtgtgtctgatcagtgacttctacccgggagctgtgacagtggcctggaaggcagatggcagccccgtcaaggcgggagtggagaccaccaaaccctccaaacagagcaacaacaagtacgcggccgagagctacctgagcctgacgcccgagcagtggaagtcccacagaagctacagctgccaggtcacgcatgaagggagcaccgtggagaagacagtggcccctacagaatgttca

SEQ ID NO: 213 - DNA, 645 bp, synthetic construct; identical to SEQ ID NO: 189
  misc_feature 1..645: note = source = /note="Description of Artificial Sequence: Synthetic polynucleotide"
  source 1..645: mol_type = other DNA

SEQ ID NO: 214 - protein, 220 aa, synthetic construct; identical to SEQ ID NO: 64
  REGION 1..220: note = source = /note="Description of Artificial Sequence: Synthetic polypeptide"

SEQ ID NO: 215 - protein, 684 aa, synthetic construct
  REGION 1..684: note = source = /note="Description of Artificial Sequence: Synthetic polypeptide"
QVQLQESGPGLVKPSETLSLTCTISGDSVSTNSVAWNWIRQPPGKGLEWIGRTYYRSKWYNDYAVSLKSRVTISPDTSKNQFSLKLSSVTAADTAVYYCAREDGDSYYRYGMDVWGQGTTVTVSSASTKGPSVFPLAPSSKSTSGGTAALGCLVKDYFPEPVTVSWNSGALTSGVHTFPAVLQSSGLYSLKSVVTVPSSSLGTQTYICNVNHKPSNTKVDKKVEPKSCDKTHTCPPCPAPELLGGPSVFLFPPKPKDTLMISRTPEVTCVVVDVSHEDPEVKFNWYVDGVEVHNAKTKPCEEQYGSTYRCVSVLTVLHQDWLNGKEYKCKVSNKALPAPIEKTISKAKGQPREPQVYTLPPSREEMTKNQVSLTCLVKGFYPSDIAVEWESNGQPENNYKTTPPVLDSDGSFFLYSKLTVDKSRWQQGNVFSCSVMHEALHNHYTQKSLSLSPGGGGSGGGGSEVQLVQSGAEVKKPGESLKISCKTSEYSFTSYWIGWVRQMPGKGLEWMGIIYLGDSDTRYSPSFQGQVTISADKSISTAYLQWSSLKASDTAMYYCARSNWGLDYWGQGTLVTVSSQPKANPTVTLFPPSSEELQANKATLVCLISDFYPGAVTVAWKADGSPVKAGVETTKPSKQSNNKYAAESYLSLTPEQWKSHRSYSCQVTHEGSTVEKTVAPTECS

SEQ ID NO: 216 - protein, 215 aa, synthetic construct; identical to SEQ ID NO: 192
  REGION 1..215: note = source = /note="Description of Artificial Sequence: Synthetic polypeptide"

SEQ ID NO: 217 - DNA, 2064 bp, synthetic construct
  misc_feature 1..2064: note = source = /note="Description of Artificial Sequence: Synthetic polynucleotide"
  source 1..2064: mol_type = other DNA
gaggtacaactggtggaatcaggtggaggtttggtgcagccggggagatcgctcaggcttagctgtgcggcatcggggtttactttcgatgattatgcgatgcattgggtccggcaagcgcctggaaaagggctcgagtgggtttccgccattacgtggaatagcggacacatcgattatgcagacagtgtggagggcagattcacaatctcacgagacaatgctaagaacagcctgtaccttcagatgaactcacttcgcgcggaagataccgccgtatactactgcgccaaagtctcctacttgtctacagcttcgtcgctcgactattggggtcaaggaacgttggtcaccgtctctagtacggtggctgcaccatctgtcttcatcttcccgccatctgatgagcagttgaaatctggaactgcctctgttgtgtgcctgctgaataacttctatcccagagaggccaaagtacagtggaaggtggataacgccctccaatcgggtaactcccaggagagtgtcacagagcaggacagcaaggacagcacctacagcctcaagagcaccctgacgctgagcaaagcagactacgagaaacacaaagtctacgcctgcgaagtcacccatcagggcctgagctcgcccgtcacaaagagcttcaacaggggagagtgtgacaaaactcacacatgcccaccgtgcccagcacctgaactcctggggggaccgtcagtcttcctcttccccccaaaacccaaggacaccctcatgatctcccggacccctgaggtcacatgcgtggtggtggacgtgagccacgaagaccctgaggtcaagttcaactggtacgtggacggcgtggaggtgcataatgccaagacaaagccgtgtgaggagcagtacggcagcacgtaccgttgtgtcagcgtcctcaccgtcctgcaccaggactggctgaatggcaaggagtacaagtgcaaggtctccaacaaagccctcccagcccccatcgagaaaaccatctccaaagccaaagggcagccccgagaaccacaggtgtacaccctgcccccatcccgggaggagatgaccaagaaccaggtcagcctgacctgcctggtcaaaggcttctatcccagcgacatcgccgtggagtgggagagcaatgggcagccggagaacaactacaagaccacgcctcccgtgctggactccgacggctccttcttcctctatagcaagctcaccgtggacaagagcaggtggcagcaggggaacgtcttctcatgctccgtgatgcatgaggctctgcacaaccactacacgcagaagagcctctccctgtctccgggtggtggcggatcgggaggtggcggatcccaggtgcagttacagcagtcgggcgcaggactgttgaagccttcggagaccctgtccctcacctgcgctgtccatggtgggtccttcagtggttactactggaactggattcgccagccaccagggaaggggctagagtggattggggaaatcaatcatgctggaaacaccaactacaacccgtccctcaagagtcgagtcaccatatcattagacacgtccaagaaccagttctccctgacgctgacctctgtgaccgccgcggacacggctgtgtattactgtgcgagaggatattgtagaagtaccacctgctactttgactactggggccagggaaccctagtcaccgtctcctcaactgtggctgcaccatctgtcttcatcttcccgccatctgatgagcagttgaaatctggaactgcctctgttgtgtgcctgctgaataacttctatcccagagaggccaaagtacagtggaaggtggataacgccctccaatcgggtaactcccaggagagtgtcacagagcaggacagcaaggacagcacctacagcctcgaaagcaccctgacgctgagcaaagcagactacgagaaacacaaagtctacgcctgcgaagtcacccatcagggcctgagctcgcccgtcacaaagagcttcaacaggggagagtgt

SEQ ID NO: 218 - DNA, 633 bp, synthetic construct; identical to SEQ ID NO: 147
  misc_feature 1..633: note = source = /note="Description of Artificial Sequence: Synthetic polynucleotide"
  source 1..633: mol_type = other DNA

SEQ ID NO: 219 - DNA, 633 bp, synthetic construct; identical to SEQ ID NO: 75
  misc_feature 1..633: note = source = /note="Description of Artificial Sequence: Synthetic polynucleotide"
  source 1..633: mol_type = other DNA

SEQ ID NO: 220 - protein, 688 aa, synthetic construct
  REGION 1..688: note = source = /note="Description of Artificial Sequence: Synthetic polypeptide"
EVQLVESGGGLVQPGRSLRLSCAASGFTFDDYAMHWVRQAPGKGLEWVSAITWNSGHIDYADSVEGRFTISRDNAKNSLYLQMNSLRAEDTAVYYCAKVSYLSTASSLDYWGQGTLVTVSSTVAAPSVFIFPPSDEQLKSGTASVVCLLNNFYPREAKVQWKVDNALQSGNSQESVTEQDSKDSTYSLKSTLTLSKADYEKHKVYACEVTHQGLSSPVTKSFNRGECDKTHTCPPCPAPELLGGPSVFLFPPKPKDTLMISRTPEVTCVVVDVSHEDPEVKFNWYVDGVEVHNAKTKPCEEQYGSTYRCVSVLTVLHQDWLNGKEYKCKVSNKALPAPIEKTISKAKGQPREPQVYTLPPSREEMTKNQVSLTCLVKGFYPSDIAVEWESNGQPENNYKTTPPVLDSDGSFFLYSKLTVDKSRWQQGNVFSCSVMHEALHNHYTQKSLSLSPGGGGSGGGGSQVQLQQSGAGLLKPSETLSLTCAVHGGSFSGYYWNWIRQPPGKGLEWIGEINHAGNTNYNPSLKSRVTISLDTSKNQFSLTLTSVTAADTAVYYCARGYCRSTTCYFDYWGQGTLVTVSSTVAAPSVFIFPPSDEQLKSGTASVVCLLNNFYPREAKVQWKVDNALQSGNSQESVTEQDSKDSTYSLESTLTLSKADYEKHKVYACEVTHQGLSSPVTKSFNRGEC

SEQ ID NO: 221 - protein, 211 aa, synthetic construct; identical to SEQ ID NO: 150
  REGION 1..211: note = source = /note="Description of Artificial Sequence: Synthetic polypeptide"

SEQ ID NO: 222 - protein, 211 aa, synthetic construct; identical to SEQ ID NO: 78
  REGION 1..211: note = source = /note="Description of Artificial Sequence: Synthetic polypeptide"

SEQ ID NO: 223 - DNA, 2058 bp, synthetic construct
  misc_feature 1..2058: note = source = /note="Description of Artificial Sequence: Synthetic polynucleotide"
  source 1..2058: mol_type = other DNA
gaggtacaactggtggaatcaggtggaggtttggtgcagccggggagatcgctcaggcttagctgtgcggcatcggggtttactttcgatgattatgcgatgcattgggtccggcaagcgcctggaaaagggctcgagtgggtttccgccattacgtggaatagcggacacatcgattatgcagacagtgtggagggcagattcacaatctcacgagacaatgctaagaacagcctgtaccttcagatgaactcacttcgcgcggaagataccgccgtatactactgcgccaaagtctcctacttgtctacagcttcgtcgctcgactattggggtcaaggaacgttggtcaccgtctctagtacggtggctgcaccatctgtcttcatcttcccgccatctgatgagcagttgaaatctggaactgcctctgttgtgtgcctgctgaataacttctatcccagagaggccaaagtacagtggaaggtggataacgccctccaatcgggtaactcccaggagagtgtcacagagcaggacagcaaggacagcacctacagcctcaagagcaccctgacgctgagcaaagcagactacgagaaacacaaagtctacgcctgcgaagtcacccatcagggcctgagctcgcccgtcacaaagagcttcaacaggggagagtgtgacaaaactcacacatgcccaccgtgcccagcacctgaactcctggggggaccgtcagtcttcctcttccccccaaaacccaaggacaccctcatgatctcccggacccctgaggtcacatgcgtggtggtggacgtgagccacgaagaccctgaggtcaagttcaactggtacgtggacggcgtggaggtgcataatgccaagacaaagccgtgtgaggagcagtacggcagcacgtaccgttgtgtcagcgtcctcaccgtcctgcaccaggactggctgaatggcaaggagtacaagtgcaaggtctccaacaaagccctcccagcccccatcgagaaaaccatctccaaagccaaagggcagccccgagaaccacaggtgtacaccctgcccccatcccgggaggagatgaccaagaaccaggtcagcctgacctgcctggtcaaaggcttctatcccagcgacatcgccgtggagtgggagagcaatgggcagccggagaacaactacaagaccacgcctcccgtgctggactccgacggctccttcttcctctatagcaagctcaccgtggacaagagcaggtggcagcaggggaacgtcttctcatgctccgtgatgcatgaggctctgcacaaccactacacgcagaagagcctctccctgtctccgggtggtggcggatcgggaggtggcggatcccaggtgcagctgcaggagtcgggcccaggactggtgaagccttcggagaccctgtccctcacctgcactgtctctggtggctccatcagtagttacttctggagctggattcggcagcccccaggtaagggactggagtggattggctatatctattacagtgggcagaccaaatacaacccctccctcaagagtcgagtcaccatatcaatagacacgtccaagaaccagttctccctgaagctgagctctgtgaccgctgcggacacggccgtgtattactgtgcgagagaaactgggagctactacggctttgactactggggccagggaaccctggtcaccgtctcctcaactgtggctgcaccatctgtcttcatcttcccgccatctgatgagcagttgaaatctggaactgcctctgttgtgtgcctgctgaataacttctatcccagagaggccaaagtacagtggaaggtggataacgccctccaatcgggtaactcccaggagagtgtcacagagcaggacagcaaggacagcacctacagcctcgaaagcaccctgacgctgagcaaagcagactacgagaaacacaaagtctacgcctgcgaagtcacccatcagggcctgagctcgcccgtcacaaagagcttcaacaggggagagtgt

SEQ ID NO: 224 - DNA, 633 bp, synthetic construct; identical to SEQ ID NO: 153
  misc_feature 1..633: note = source = /note="Description of Artificial Sequence: Synthetic polynucleotide"
  source 1..633: mol_type = other DNA

SEQ ID NO: 225 - DNA, 633 bp, synthetic construct; identical to SEQ ID NO: 75
  misc_feature 1..633: note = source = /note="Description of Artificial Sequence: Synthetic polynucleotide"
  source 1..633: mol_type = other DNA

SEQ ID NO: 226 - protein, 686 aa, synthetic construct
  REGION 1..686: note = source = /note="Description of Artificial Sequence: Synthetic polypeptide"
EVQLVESGGGLVQPGRSLRLSCAASGFTFDDYAMHWVRQAPGKGLEWVSAITWNSGHIDYADSVEGRFTISRDNAKNSLYLQMNSLRAEDTAVYYCAKVSYLSTASSLDYWGQGTLVTVSSTVAAPSVFIFPPSDEQLKSGTASVVCLLNNFYPREAKVQWKVDNALQSGNSQESVTEQDSKDSTYSLKSTLTLSKADYEKHKVYACEVTHQGLSSPVTKSFNRGECDKTHTCPPCPAPELLGGPSVFLFPPKPKDTLMISRTPEVTCVVVDVSHEDPEVKFNWYVDGVEVHNAKTKPCEEQYGSTYRCVSVLTVLHQDWLNGKEYKCKVSNKALPAPIEKTISKAKGQPREPQVYTLPPSREEMTKNQVSLTCLVKGFYPSDIAVEWESNGQPENNYKTTPPVLDSDGSFFLYSKLTVDKSRWQQGNVFSCSVMHEALHNHYTQKSLSLSPGGGGSGGGGSQVQLQESGPGLVKPSETLSLTCTVSGGSISSYFWSWIRQPPGKGLEWIGYIYYSGQTKYNPSLKSRVTISIDTSKNQFSLKLSSVTAADTAVYYCARETGSYYGFDYWGQGTLVTVSSTVAAPSVFIFPPSDEQLKSGTASVVCLLNNFYPREAKVQWKVDNALQSGNSQESVTEQDSKDSTYSLESTLTLSKADYEKHKVYACEVTHQGLSSPVTKSFNRGEC

SEQ ID NO: 227 - protein, 211 aa, synthetic construct; identical to SEQ ID NO: 156
  REGION 1..211: note = source = /note="Description of Artificial Sequence: Synthetic polypeptide"

SEQ ID NO: 228 - protein, 211 aa, synthetic construct; identical to SEQ ID NO: 78
  REGION 1..211: note = source = /note="Description of Artificial Sequence: Synthetic polypeptide"

SEQ ID NO: 229 - DNA, 2079 bp, synthetic construct
  misc_feature 1..2079: note = source = /note="Description of Artificial Sequence: Synthetic polynucleotide"
  source 1..2079: mol_type = other DNA
gaggtacaactggtggaatcaggtggaggtttggtgcagccggggagatcgctcaggcttagctgtgcggcatcggggtttactttcgatgattatgcgatgcattgggtccggcaagcgcctggaaaagggctcgagtgggtttccgccattacgtggaatagcggacacatcgattatgcagacagtgtggagggcagattcacaatctcacgagacaatgctaagaacagcctgtaccttcagatgaactcacttcgcgcggaagataccgccgtatactactgcgccaaagtctcctacttgtctacagcttcgtcgctcgactattggggtcaaggaacgttggtcaccgtctctagtacggtggctgcaccatctgtcttcatcttcccgccatctgatgagcagttgaaatctggaactgcctctgttgtgtgcctgctgaataacttctatcccagagaggccaaagtacagtggaaggtggataacgccctccaatcgggtaactcccaggagagtgtcacagagcaggacagcaaggacagcacctacagcctcaagagcaccctgacgctgagcaaagcagactacgagaaacacaaagtctacgcctgcgaagtcacccatcagggcctgagctcgcccgtcacaaagagcttcaacaggggagagtgtgacaaaactcacacatgcccaccgtgcccagcacctgaactcctggggggaccgtcagtcttcctcttccccccaaaacccaaggacaccctcatgatctcccggacccctgaggtcacatgcgtggtggtggacgtgagccacgaagaccctgaggtcaagttcaactggtacgtggacggcgtggaggtgcataatgccaagacaaagccgtgtgaggagcagtacggcagcacgtaccgttgtgtcagcgtcctcaccgtcctgcaccaggactggctgaatggcaaggagtacaagtgcaaggtctccaacaaagccctcccagcccccatcgagaaaaccatctccaaagccaaagggcagccccgagaaccacaggtgtacaccctgcccccatcccgggaggagatgaccaagaaccaggtcagcctgacctgcctggtcaaaggcttctatcccagcgacatcgccgtggagtgggagagcaatgggcagccggagaacaactacaagaccacgcctcccgtgctggactccgacggctccttcttcctctatagcaagctcaccgtggacaagagcaggtggcagcaggggaacgtcttctcatgctccgtgatgcatgaggctctgcacaaccactacacgcagaagagcctctccctgtctccgggtggtggcggatcgggaggtggcggatcccaggtacagttgcaggagtcaggtccaggactggtgaagccctcggagaccctctcactcacctgtaccatctccggggacagtgtctctaccaacagtgttgcttggaactggattaggcagcccccagggaaaggccttgagtggataggaaggacatactacaggtccaagtggtataatgattatgcagtttctctgaaaagtcgagtaaccatcagcccagacacatccaagaaccagttctccctgaagctgagctctgtgactgccgcggacacggctgtgtattactgtgcaagagaggatggggatagctactaccgctacggtatggacgtctggggccaagggaccacggtcaccgtctcctcaactgtggctgcaccatctgtcttcatcttcccgccatctgatgagcagttgaaatctggaactgcctctgttgtgtgcctgctgaataacttctatcccagagaggccaaagtacagtggaaggtggataacgccctccaatcgggtaactcccaggagagtgtcacagagcaggacagcaaggacagcacctacagcctcgaaagcaccctgacgctgagcaaagcagactacgagaaacacaaagtctacgcctgcgaagtcacccatcagggcctgagctcgcccgtcacaaagagcttcaacaggggagagtgt

SEQ ID NO: 230 - DNA, 651 bp, synthetic construct; identical to SEQ ID NO: 159
  misc_feature 1..651: note = source = /note="Description of Artificial Sequence: Synthetic polynucleotide"
  source 1..651: mol_type = other DNA

SEQ ID NO: 231 - DNA, 633 bp, synthetic construct; identical to SEQ ID NO: 75
  misc_feature 1..633: note = source = /note="Description of Artificial Sequence: Synthetic polynucleotide"
  source 1..633: mol_type = other DNA

SEQ ID NO: 232 - protein, 693 aa, synthetic construct
  REGION 1..693: note = source = /note="Description of Artificial Sequence: Synthetic polypeptide"
EVQLVESGGGLVQPGRSLRLSCAASGFTFDDYAMHWVRQAPGKGLEWVSAITWNSGHIDYADSVEGRFTISRDNAKNSLYLQMNSLRAEDTAVYYCAKVSYLSTASSLDYWGQGTLVTVSSTVAAPSVFIFPPSDEQLKSGTASVVCLLNNFYPREAKVQWKVDNALQSGNSQESVTEQDSKDSTYSLKSTLTLSKADYEKHKVYACEVTHQGLSSPVTKSFNRGECDKTHTCPPCPAPELLGGPSVFLFPPKPKDTLMISRTPEVTCVVVDVSHEDPEVKFNWYVDGVEVHNAKTKPCEEQYGSTYRCVSVLTVLHQDWLNGKEYKCKVSNKALPAPIEKTISKAKGQPREPQVYTLPPSREEMTKNQVSLTCLVKGFYPSDIAVEWESNGQPENNYKTTPPVLDSDGSFFLYSKLTVDKSRWQQGNVFSCSVMHEALHNHYTQKSLSLSPGGGGSGGGGSQVQLQESGPGLVKPSETLSLTCTISGDSVSTNSVAWNWIRQPPGKGLEWIGRTYYRSKWYNDYAVSLKSRVTISPDTSKNQFSLKLSSVTAADTAVYYCAREDGDSYYRYGMDVWGQGTTVTVSSTVAAPSVFIFPPSDEQLKSGTASVVCLLNNFYPREAKVQWKVDNALQSGNSQESVTEQDSKDSTYSLESTLTLSKADYEKHKVYACEVTHQGLSSPVTKSFNRGEC

SEQ ID NO: 233 - protein, 217 aa, synthetic construct; identical to SEQ ID NO: 162
  REGION 1..217: note = source = /note="Description of Artificial Sequence: Synthetic polypeptide"

SEQ ID NO: 234 - protein, 211 aa, synthetic construct; identical to SEQ ID NO: 78
  REGION 1..211: note = source = /note="Description of Artificial Sequence: Synthetic polypeptide"

SEQ ID NO: 235 - DNA, 2046 bp, synthetic construct
  misc_feature 1..2046: note = source = /note="Description of Artificial Sequence: Synthetic polynucleotide"
  source 1..2046: mol_type = other DNA
gaggtgcagctggtgcagtctggagcagaggtgaaaaagcccggggagtctctgaagatctcctgtaagacttctgaatacagctttaccagctactggatcggctgggtgcgccagatgcccgggaaaggcctggagtggatggggatcatctatcttggtgactcagataccagatacagcccgtccttccaaggccaggtcaccatctcagccgacaagtccatcagtaccgcctacctgcagtggagcagcctgaaggcctcggacaccgccatgtattactgtgcgagaagtaactggggtcttgactactggggccagggaaccctggtcaccgtctctagtcagcccaaggccaaccccactgtcactctgttcccgccctcctctgaggagctccaagccaacaaggccacactagtgtgtctgatcagtgacttctacccgggagctgtgacagtggcctggaaggcagatggcagccccgtcaaggcgggagtggagaccaccaaaccctccaaacagagcaacaacaagtacgcggccaagagctacctgagcctgacgcccgagcagtggaagtcccacagaagctacagctgccaggtcacgcatgaagggagcaccgtggagaagacagtggcccctacagaatgttcagacaaaactcacacatgcccaccgtgcccagcacctgaactcctggggggaccgtcagtcttcctcttccccccaaaacccaaggacaccctcatgatctcccggacccctgaggtcacatgcgtggtggtggacgtgagccacgaagaccctgaggtcaagttcaactggtacgtggacggcgtggaggtgcataatgccaagacaaagccgtgtgaggagcagtacggcagcacgtaccgttgtgtcagcgtcctcaccgtcctgcaccaggactggctgaatggcaaggagtacaagtgcaaggtctccaacaaagccctcccagcccccatcgagaaaaccatctccaaagccaaagggcagccccgagaaccacaggtgtacaccctgcccccatcccgggaggagatgaccaagaaccaggtcagcctgacctgcctggtcaaaggcttctatcccagcgacatcgccgtggagtgggagagcaatgggcagccggagaacaactacaagaccacgcctcccgtgctggactccgacggctccttcttcctctatagcaagctcaccgtggacaagagcaggtggcagcaggggaacgtcttctcatgctccgtgatgcatgaggctctgcacaaccactacacgcagaagagcctctccctgtctccgggtggtggcggatcgggaggtggcggatcccaggtgcagttacagcagtcgggcgcaggactgttgaagccttcggagaccctgtccctcacctgcgctgtccatggtgggtccttcagtggttactactggaactggattcgccagccaccagggaaggggctagagtggattggggaaatcaatcatgctggaaacaccaactacaacccgtccctcaagagtcgagtcaccatatcattagacacgtccaagaaccagttctccctgacgctgacctctgtgaccgccgcggacacggctgtgtattactgtgcgagaggatattgtagaagtaccacctgctactttgactactggggccagggaaccctagtcaccgtctcctcaactgtggctgcaccatctgtcttcatcttcccgccatctgatgagcagttgaaatctggaactgcctctgttgtgtgcctgctgaataacttctatcccagagaggccaaagtacagtggaaggtggataacgccctccaatcgggtaactcccaggagagtgtcacagagcaggacagcaaggacagcacctacagcctcgaaagcaccctgacgctgagcaaagcagactacgagaaacacaaagtctacgcctgcgaagtcacccatcagggcctgagctcgcccgtcacaaagagcttcaacaggggagagtgt

SEQ ID NO: 236 - DNA, 633 bp, synthetic construct; identical to SEQ ID NO: 147
  misc_feature 1..633: note = source = /note="Description of Artificial Sequence: Synthetic polynucleotide"
  source 1..633: mol_type = other DNA

SEQ ID NO: 237 - DNA, 645 bp, synthetic construct; identical to SEQ ID NO: 93
  misc_feature 1..645: note = source = /note="Description of Artificial Sequence: Synthetic polynucleotide"
  source 1..645: mol_type = other DNA

SEQ ID NO: 238 - protein, 682 aa, synthetic construct
  REGION 1..682: note = source = /note="Description of Artificial Sequence: Synthetic polypeptide"
EVQLVQSGAEVKKPGESLKISCKTSEYSFTSYWIGWVRQMPGKGLEWMGIIYLGDSDTRYSPSFQGQVTISADKSISTAYLQWSSLKASDTAMYYCARSNWGLDYWGQGTLVTVSSQPKANPTVTLFPPSSEELQANKATLVCLISDFYPGAVTVAWKADGSPVKAGVETTKPSKQSNNKYAAKSYLSLTPEQWKSHRSYSCQVTHEGSTVEKTVAPTECSDKTHTCPPCPAPELLGGPSVFLFPPKPKDTLMISRTPEVTCVVVDVSHEDPEVKFNWYVDGVEVHNAKTKPCEEQYGSTYRCVSVLTVLHQDWLNGKEYKCKVSNKALPAPIEKTISKAKGQPREPQVYTLPPSREEMTKNQVSLTCLVKGFYPSDIAVEWESNGQPENNYKTTPPVLDSDGSFFLYSKLTVDKSRWQQGNVFSCSVMHEALHNHYTQKSLSLSPGGGGSGGGGSQVQLQQSGAGLLKPSETLSLTCAVHGGSFSGYYWNWIRQPPGKGLEWIGEINHAGNTNYNPSLKSRVTISLDTSKNQFSLTLTSVTAADTAVYYCARGYCRSTTCYFDYWGQGTLVTVSSTVAAPSVFIFPPSDEQLKSGTASVVCLLNNFYPREAKVQWKVDNALQSGNSQESVTEQDSKDSTYSLESTLTLSKADYEKHKVYACEVTHQGLSSPVTKSFNRGEC

SEQ ID NO: 239 - protein, 211 aa, synthetic construct; identical to SEQ ID NO: 150
  REGION 1..211: note = source = /note="Description of Artificial Sequence: Synthetic polypeptide"

SEQ ID NO: 240 - protein, 215 aa, synthetic construct; identical to SEQ ID NO: 96
  REGION 1..215: note = source = /note="Description of Artificial Sequence: Synthetic polypeptide"

SEQ ID NO: 241 - DNA, 2040 bp, synthetic construct
  misc_feature 1..2040: note = source = /note="Description of Artificial Sequence: Synthetic polynucleotide"
  source 1..2040: mol_type = other DNA
gaggtgcagctggtgcagtctggagcagaggtgaaaaagcccggggagtctctgaagatctcctgtaagacttctgaatacagctttaccagctactggatcggctgggtgcgccagatgcccgggaaaggcctggagtggatggggatcatctatcttggtgactcagataccagatacagcccgtccttccaaggccaggtcaccatctcagccgacaagtccatcagtaccgcctacctgcagtggagcagcctgaaggcctcggacaccgccatgtattactgtgcgagaagtaactggggtcttgactactggggccagggaaccctggtcaccgtctctagtcagcccaaggccaaccccactgtcactctgttcccgccctcctctgaggagctccaagccaacaaggccacactagtgtgtctgatcagtgacttctacccgggagctgtgacagtggcctggaaggcagatggcagccccgtcaaggcgggagtggagaccaccaaaccctccaaacagagcaacaacaagtacgcggccaagagctacctgagcctgacgcccgagcagtggaagtcccacagaagctacagctgccaggtcacgcatgaagggagcaccgtggagaagacagtggcccctacagaatgttcagacaaaactcacacatgcccaccgtgcccagcacctgaactcctggggggaccgtcagtcttcctcttccccccaaaacccaaggacaccctcatgatctcccggacccctgaggtcacatgcgtggtggtggacgtgagccacgaagaccctgaggtcaagttcaactggtacgtggacggcgtggaggtgcataatgccaagacaaagccgtgtgaggagcagtacggcagcacgtaccgttgtgtcagcgtcctcaccgtcctgcaccaggactggctgaatggcaaggagtacaagtgcaaggtctccaacaaagccctcccagcccccatcgagaaaaccatctccaaagccaaagggcagccccgagaaccacaggtgtacaccctgcccccatcccgggaggagatgaccaagaaccaggtcagcctgacctgcctggtcaaaggcttctatcccagcgacatcgccgtggagtgggagagcaatgggcagccggagaacaactacaagaccacgcctcccgtgctggactccgacggctccttcttcctctatagcaagctcaccgtggacaagagcaggtggcagcaggggaacgtcttctcatgctccgtgatgcatgaggctctgcacaaccactacacgcagaagagcctctccctgtctccgggtggtggcggatcgggaggtggcggatcccaggtgcagctgcaggagtcgggcccaggactggtgaagccttcggagaccctgtccctcacctgcactgtctctggtggctccatcagtagttacttctggagctggattcggcagcccccaggtaagggactggagtggattggctatatctattacagtgggcagaccaaatacaacccctccctcaagagtcgagtcaccatatcaatagacacgtccaagaaccagttctccctgaagctgagctctgtgaccgctgcggacacggccgtgtattactgtgcgagagaaactgggagctactacggctttgactactggggccagggaaccctggtcaccgtctcctcaactgtggctgcaccatctgtcttcatcttcccgccatctgatgagcagttgaaatctggaactgcctctgttgtgtgcctgctgaataacttctatcccagagaggccaaagtacagtggaaggtggataacgccctccaatcgggtaactcccaggagagtgtcacagagcaggacagcaaggacagcacctacagcctcgaaagcaccctgacgctgagcaaagcagactacgagaaacacaaagtctacgcctgcgaagtcacccatcagggcctgagctcgcccgtcacaaagagcttcaacaggggagagtgt

SEQ ID NO: 242 - DNA, 633 bp, synthetic construct; identical to SEQ ID NO: 153
  misc_feature 1..633: note = source = /note="Description of Artificial Sequence: Synthetic polynucleotide"
  source 1..633: mol_type = other DNA

SEQ ID NO: 243 - DNA, 645 bp, synthetic construct; identical to SEQ ID NO: 93
  misc_feature 1..645: note = source = /note="Description of Artificial Sequence: Synthetic polynucleotide"
  source 1..645: mol_type = other DNA

SEQ ID NO: 244 - protein, 680 aa, synthetic construct
  REGION 1..680: note = source = /note="Description of Artificial Sequence: Synthetic polypeptide"
EVQLVQSGAEVKKPGESLKISCKTSEYSFTSYWIGWVRQMPGKGLEWMGIIYLGDSDTRYSPSFQGQVTISADKSISTAYLQWSSLKASDTAMYYCARSNWGLDYWGQGTLVTVSSQPKANPTVTLFPPSSEELQANKATLVCLISDFYPGAVTVAWKADGSPVKAGVETTKPSKQSNNKYAAKSYLSLTPEQWKSHRSYSCQVTHEGSTVEKTVAPTECSDKTHTCPPCPAPELLGGPSVFLFPPKPKDTLMISRTPEVTCVVVDVSHEDPEVKFNWYVDGVEVHNAKTKPCEEQYGSTYRCVSVLTVLHQDWLNGKEYKCKVSNKALPAPIEKTISKAKGQPREPQVYTLPPSREEMTKNQVSLTCLVKGFYPSDIAVEWESNGQPENNYKTTPPVLDSDGSFFLYSKLTVDKSRWQQGNVFSCSVMHEALHNHYTQKSLSLSPGGGGSGGGGSQVQLQESGPGLVKPSETLSLTCTVSGGSISSYFWSWIRQPPGKGLEWIGYIYYSGQTKYNPSLKSRVTISIDTSKNQFSLKLSSVTAADTAVYYCARETGSYYGFDYWGQGTLVTVSSTVAAPSVFIFPPSDEQLKSGTASVVCLLNNFYPREAKVQWKVDNALQSGNSQESVTEQDSKDSTYSLESTLTLSKADYEKHKVYACEVTHQGLSSPVTKSFNRGEC

SEQ ID NO: 245 - protein, 211 aa, synthetic construct; identical to SEQ ID NO: 156
  REGION 1..211: note = source = /note="Description of Artificial Sequence: Synthetic polypeptide"

SEQ ID NO: 246 - protein, 215 aa, synthetic construct; identical to SEQ ID NO: 96
  REGION 1..215: note = source = /note="Description of Artificial Sequence: Synthetic polypeptide"

SEQ ID NO: 247 - DNA, 2061 bp, synthetic construct
  misc_feature 1..2061: note = source = /note="Description of Artificial Sequence: Synthetic polynucleotide"
  source 1..2061: mol_type = other DNA
gaggtgcagctggtgcagtctggagcagaggtgaaaaagcccggggagtctctgaagatctcctgtaagacttctgaatacagctttaccagctactggatcggctgggtgcgccagatgcccgggaaaggcctggagtggatggggatcatctatcttggtgactcagataccagatacagcccgtccttccaaggccaggtcaccatctcagccgacaagtccatcagtaccgcctacctgcagtggagcagcctgaaggcctcggacaccgccatgtattactgtgcgagaagtaactggggtcttgactactggggccagggaaccctggtcaccgtctctagtcagcccaaggccaaccccactgtcactctgttcccgccctcctctgaggagctccaagccaacaaggccacactagtgtgtctgatcagtgacttctacccgggagctgtgacagtggcctggaaggcagatggcagccccgtcaaggcgggagtggagaccaccaaaccctccaaacagagcaacaacaagtacgcggccaagagctacctgagcctgacgcccgagcagtggaagtcccacagaagctacagctgccaggtcacgcatgaagggagcaccgtggagaagacagtggcccctacagaatgttcagacaaaactcacacatgcccaccgtgcccagcacctgaactcctggggggaccgtcagtcttcctcttccccccaaaacccaaggacaccctcatgatctcccggacccctgaggtcacatgcgtggtggtggacgtgagccacgaagaccctgaggtcaagttcaactggtacgtggacggcgtggaggtgcataatgccaagacaaagccgtgtgaggagcagtacggcagcacgtaccgttgtgtcagcgtcctcaccgtcctgcaccaggactggctgaatggcaaggagtacaagtgcaaggtctccaacaaagccctcccagcccccatcgagaaaaccatctccaaagccaaagggcagccccgagaaccacaggtgtacaccctgcccccatcccgggaggagatgaccaagaaccaggtcagcctgacctgcctggtcaaaggcttctatcccagcgacatcgccgtggagtgggagagcaatgggcagccggagaacaactacaagaccacgcctcccgtgctggactccgacggctccttcttcctctatagcaagctcaccgtggacaagagcaggtggcagcaggggaacgtcttctcatgctccgtgatgcatgaggctctgcacaaccactacacgcagaagagcctctccctgtctccgggtggtggcggatcgggaggtggcggatcccaggtacagttgcaggagtcaggtccaggactggtgaagccctcggagaccctctcactcacctgtaccatctccggggacagtgtctctaccaacagtgttgcttggaactggattaggcagcccccagggaaaggccttgagtggataggaaggacatactacaggtccaagtggtataatgattatgcagtttctctgaaaagtcgagtaaccatcagcccagacacatccaagaaccagttctccctgaagctgagctctgtgactgccgcggacacggctgtgtattactgtgcaagagaggatggggatagctactaccgctacggtatggacgtctggggccaagggaccacggtcaccgtctcctcaactgtggctgcaccatctgtcttcatcttcccgccatctgatgagcagttgaaatctggaactgcctctgttgtgtgcctgctgaataacttctatcccagagaggccaaagtacagtggaaggtggataacgccctccaatcgggtaactcccaggagagtgtcacagagcaggacagcaaggacagcacctacagcctcgaaagcaccctgacgctgagcaaagcagactacgagaaacacaaagtctacgcctgcgaagtcacccatcagggcctgagctcgcccgtcacaaagagcttcaacaggggagagtgt

SEQ ID NO: 248 - DNA, 651 bp, synthetic construct; identical to SEQ ID NO: 159
  misc_feature 1..651: note = source = /note="Description of Artificial Sequence: Synthetic polynucleotide"
  source 1..651: mol_type = other DNA

SEQ ID NO: 249 - DNA, 645 bp, synthetic construct; identical to SEQ ID NO: 93
  misc_feature 1..645: note = source = /note="Description of Artificial Sequence: Synthetic polynucleotide"
  source 1..645: mol_type = other DNA

SEQ ID NO: 250 - protein, 687 aa, synthetic construct
  REGION 1..687: note = source = /note="Description of Artificial Sequence: Synthetic polypeptide"
EVQLVQSGAEVKKPGESLKISCKTSEYSFTSYWIGWVRQMPGKGLEWMGIIYLGDSDTRYSPSFQGQVTISADKSISTAYLQWSSLKASDTAMYYCARSNWGLDYWGQGTLVTVSSQPKANPTVTLFPPSSEELQANKATLVCLISDFYPGAVTVAWKADGSPVKAGVETTKPSKQSNNKYAAKSYLSLTPEQWKSHRSYSCQVTHEGSTVEKTVAPTECSDKTHTCPPCPAPELLGGPSVFLFPPKPKDTLMISRTPEVTCVVVDVSHEDPEVKFNWYVDGVEVHNAKTKPCEEQYGSTYRCVSVLTVLHQDWLNGKEYKCKVSNKALPAPIEKTISKAKGQPREPQVYTLPPSREEMTKNQVSLTCLVKGFYPSDIAVEWESNGQPENNYKTTPPVLDSDGSFFLYSKLTVDKSRWQQGNVFSCSVMHEALHNHYTQKSLSLSPGGGGSGGGGSQVQLQESGPGLVKPSETLSLTCTISGDSVSTNSVAWNWIRQPPGKGLEWIGRTYYRSKWYNDYAVSLKSRVTISPDTSKNQFSLKLSSVTAADTAVYYCAREDGDSYYRYGMDVWGQGTTVTVSSTVAAPSVFIFPPSDEQLKSGTASVVCLLNNFYPREAKVQWKVDNALQSGNSQESVTEQDSKDSTYSLESTLTLSKADYEKHKVYACEVTHQGLSSPVTKSFNRGEC

SEQ ID NO: 251 - protein, 217 aa, synthetic construct; identical to SEQ ID NO: 162
  REGION 1..217: note = source = /note="Description of Artificial Sequence: Synthetic polypeptide"

SEQ ID NO: 252 - protein, 215 aa, synthetic construct; identical to SEQ ID NO: 96
  REGION 1..215: note = source = /note="Description of Artificial Sequence: Synthetic polypeptide"

SEQ ID NO: 253 - DNA, 2064 bp, synthetic construct
  misc_feature 1..2064: note = source = /note="Description of Artificial Sequence: Synthetic polynucleotide"
  source 1..2064: mol_type = other DNA
caggtgcagttacagcagtcgggcgcaggactgttgaagccttcggagaccctgtccctcacctgcgctgtccatggtgggtccttcagtggttactactggaactggattcgccagccaccagggaaggggctagagtggattggggaaatcaatcatgctggaaacaccaactacaacccgtccctcaagagtcgagtcaccatatcattagacacgtccaagaaccagttctccctgacgctgacctctgtgaccgccgcggacacggctgtgtattactgtgcgagaggatattgtagaagtaccacctgctactttgactactggggccagggaaccctagtcaccgtctcctcaacggtggctgcaccatctgtcttcatcttcccgccatctgatgagcagttgaaatctggaactgcctctgttgtgtgcctgctgaataacttctatcccagagaggccaaagtacagtggaaggtggataacgccctccaatcgggtaactcccaggagagtgtcacagagcaggacagcaaggacagcacctacagcctcaagagcaccctgacgctgagcaaagcagactacgagaaacacaaagtctacgcctgcgaagtcacccatcagggcctgagctcgcccgtcacaaagagcttcaacaggggagagtgtgacaaaactcacacatgcccaccgtgcccagcacctgaactcctggggggaccgtcagtcttcctcttccccccaaaacccaaggacaccctcatgatctcccggacccctgaggtcacatgcgtggtggtggacgtgagccacgaagaccctgaggtcaagttcaactggtacgtggacggcgtggaggtgcataatgccaagacaaagccgtgtgaggagcagtacggcagcacgtaccgttgtgtcagcgtcctcaccgtcctgcaccaggactggctgaatggcaaggagtacaagtgcaaggtctccaacaaagccctcccagcccccatcgagaaaaccatctccaaagccaaagggcagccccgagaaccacaggtgtacaccctgcccccatcccgggaggagatgaccaagaaccaggtcagcctgacctgcctggtcaaaggcttctatcccagcgacatcgccgtggagtgggagagcaatgggcagccggagaacaactacaagaccacgcctcccgtgctggactccgacggctccttcttcctctatagcaagctcaccgtggacaagagcaggtggcagcaggggaacgtcttctcatgctccgtgatgcatgaggctctgcacaaccactacacgcagaagagcctctccctgtctccgggtggtggcggatcgggaggtggcggatccgaggtacaactggtggaatcaggtggaggtttggtgcagccggggagatcgctcaggcttagctgtgcggcatcggggtttactttcgatgattatgcgatgcattgggtccggcaagcgcctggaaaagggctcgagtgggtttccgccattacgtggaatagcggacacatcgattatgcagacagtgtggagggcagattcacaatctcacgagacaatgctaagaacagcctgtaccttcagatgaactcacttcgcgcggaagataccgccgtatactactgcgccaaagtctcctacttgtctacagcttcgtcgctcgactattggggtcaaggaacgttggtcaccgtctctagtactgtggctgcaccatctgtcttcatcttcccgccatctgatgagcagttgaaatctggaactgcctctgttgtgtgcctgctgaataacttctatcccagagaggccaaagtacagtggaaggtggataacgccctccaatcgggtaactcccaggagagtgtcacagagcaggacagcaaggacagcacctacagcctcgaaagcaccctgacgctgagcaaagcagactacgagaaacacaaagtctacgcctgcgaagtcacccatcagggcctgagctcgcccgtcacaaagagcttcaacaggggagagtgt

SEQ ID NO: 254 - DNA, 633 bp, synthetic construct; identical to SEQ ID NO: 183
  misc_feature 1..633: note = source = /note="Description of Artificial Sequence: Synthetic polynucleotide"
  source 1..633: mol_type = other DNA

SEQ ID NO: 255 - DNA, 633 bp, synthetic construct; identical to SEQ ID NO: 111
  misc_feature 1..633: note = source = /note="Description of Artificial Sequence: Synthetic polynucleotide"
  source 1..633: mol_type = other DNA

SEQ ID NO: 256 - protein, 688 aa, synthetic construct
  REGION 1..688: note = source = /note="Description of Artificial Sequence: Synthetic polypeptide"
QVQLQQSGAGLLKPSETLSLTCAVHGGSFSGYYWNWIRQPPGKGLEWIGEINHAGNTNYNPSLKSRVTISLDTSKNQFSLTLTSVTAADTAVYYCARGYCRSTTCYFDYWGQGTLVTVSSTVAAPSVFIFPPSDEQLKSGTASVVCLLNNFYPREAKVQWKVDNALQSGNSQESVTEQDSKDSTYSLKSTLTLSKADYEKHKVYACEVTHQGLSSPVTKSFNRGECDKTHTCPPCPAPELLGGPSVFLFPPKPKDTLMISRTPEVTCVVVDVSHEDPEVKFNWYVDGVEVHNAKTKPCEEQYGSTYRCVSVLTVLHQDWLNGKEYKCKVSNKALPAPIEKTISKAKGQPREPQVYTLPPSREEMTKNQVSLTCLVKGFYPSDIAVEWESNGQPENNYKTTPPVLDSDGSFFLYSKLTVDKSRWQQGNVFSCSVMHEALHNHYTQKSLSLSPGGGGSGGGGSEVQLVESGGGLVQPGRSLRLSCAASGFTFDDYAMHWVRQAPGKGLEWVSAITWNSGHIDYADSVEGRFTISRDNAKNSLYLQMNSLRAEDTAVYYCAKVSYLSTASSLDYWGQGTLVTVSSTVAAPSVFIFPPSDEQLKSGTASVVCLLNNFYPREAKVQWKVDNALQSGNSQESVTEQDSKDSTYSLESTLTLSKADYEKHKVYACEVTHQGLSSPVTKSFNRGEC

SEQ ID NO: 257 - protein, 211 aa, synthetic construct; identical to SEQ ID NO: 186
  REGION 1..211: note = source = /note="Description of Artificial Sequence: Synthetic polypeptide"

SEQ ID NO: 258 - protein, 211 aa, synthetic construct; identical to SEQ ID NO: 114
  REGION 1..211: note = source = /note="Description of Artificial Sequence: Synthetic polypeptide"

SEQ ID NO: 259 - DNA, 2046 bp, synthetic construct
  misc_feature 1..2046: note = source = /note="Description of Artificial Sequence: Synthetic polynucleotide"
  source 1..2046: mol_type = other DNA
caggtgcagttacagcagtcgggcgcaggactgttgaagccttcggagaccctgtccctcacctgcgctgtccatggtgggtccttcagtggttactactggaactggattcgccagccaccagggaaggggctagagtggattggggaaatcaatcatgctggaaacaccaactacaacccgtccctcaagagtcgagtcaccatatcattagacacgtccaagaaccagttctccctgacgctgacctctgtgaccgccgcggacacggctgtgtattactgtgcgagaggatattgtagaagtaccacctgctactttgactactggggccagggaaccctagtcaccgtctcctcaacggtggctgcaccatctgtcttcatcttcccgccatctgatgagcagttgaaatctggaactgcctctgttgtgtgcctgctgaataacttctatcccagagaggccaaagtacagtggaaggtggataacgccctccaatcgggtaactcccaggagagtgtcacagagcaggacagcaaggacagcacctacagcctcaagagcaccctgacgctgagcaaagcagactacgagaaacacaaagtctacgcctgcgaagtcacccatcagggcctgagctcgcccgtcacaaagagcttcaacaggggagagtgtgacaaaactcacacatgcccaccgtgcccagcacctgaactcctggggggaccgtcagtcttcctcttccccccaaaacccaaggacaccctcatgatctcccggacccctgaggtcacatgcgtggtggtggacgtgagccacgaagaccctgaggtcaagttcaactggtacgtggacggcgtggaggtgcataatgccaagacaaagccgtgtgaggagcagtacggcagcacgtaccgttgtgtcagcgtcctcaccgtcctgcaccaggactggctgaatggcaaggagtacaagtgcaaggtctccaacaaagccctcccagcccccatcgagaaaaccatctccaaagccaaagggcagccccgagaaccacaggtgtacaccctgcccccatcccgggaggagatgaccaagaaccaggtcagcctgacctgcctggtcaaaggcttctatcccagcgacatcgccgtggagtgggagagcaatgggcagccggagaacaactacaagaccacgcctcccgtgctggactccgacggctccttcttcctctatagcaagctcaccgtggacaagagcaggtggcagcaggggaacgtcttctcatgctccgtgatgcatgaggctctgcacaaccactacacgcagaagagcctctccctgtctccgggtggtggcggatcgggaggtggcggatccgaggtgcagctggtgcagtctggagcagaggtgaaaaagcccggggagtctctgaagatctcctgtaagacttctgaatacagctttaccagctactggatcggctgggtgcgccagatgcccgggaaaggcctggagtggatggggatcatctatcttggtgactcagataccagatacagcccgtccttccaaggccaggtcaccatctcagccgacaagtccatcagtaccgcctacctgcagtggagcagcctgaaggcctcggacaccgccatgtattactgtgcgagaagtaactggggtcttgactactggggccagggaaccctggtcaccgtctctagtcagcccaaggccaaccccactgtcactctgttcccgccctcctctgaggagctccaagccaacaaggccacactagtgtgtctgatcagtgacttctacccgggagctgtgacagtggcctggaaggcagatggcagccccgtcaaggcgggagtggagaccaccaaaccctccaaacagagcaacaacaagtacgcggccgagagctacctgagcctgacgcccgagcagtggaagtcccacagaagctacagctgccaggtcacgcatgaagggagcaccgtggagaagacagtggcccctacagaatgttca

SEQ ID NO: 260 - DNA, 645 bp, synthetic construct; identical to SEQ ID NO: 189
  misc_feature 1..645: note = source = /note="Description of Artificial Sequence: Synthetic polynucleotide"
  source 1..645: mol_type = other DNA

SEQ ID NO: 261 - DNA, 633 bp, synthetic construct; identical to SEQ ID NO: 111
  misc_feature 1..633: note = source = /note="Description of Artificial Sequence: Synthetic polynucleotide"
  source 1..633: mol_type = other DNA

SEQ ID NO: 262 - protein, 682 aa, synthetic construct
  REGION 1..682: note = source = /note="Description of Artificial Sequence: Synthetic polypeptide"
QVQLQQSGAGLLKPSETLSLTCAVHGGSFSGYYWNWIRQPPGKGLEWIGEINHAGNTNYNPSLKSRVTISLDTSKNQFSLTLTSVTAADTAVYYCARGYCRSTTCYFDYWGQGTLVTVSSTVAAPSVFIFPPSDEQLKSGTASVVCLLNNFYPREAKVQWKVDNALQSGNSQESVTEQDSKDSTYSLKSTLTLSKADYEKHKVYACEVTHQGLSSPVTKSFNRGECDKTHTCPPCPAPELLGGPSVFLFPPKPKDTLMISRTPEVTCVVVDVSHEDPEVKFNWYVDGVEVHNAKTKPCEEQYGSTYRCVSVLTVLHQDWLNGKEYKCKVSNKALPAPIEKTISKAKGQPREPQVYTLPPSREEMTKNQVSLTCLVKGFYPSDIAVEWESNGQPENNYKTTPPVLDSDGSFFLYSKLTVDKSRWQQGNVFSCSVMHEALHNHYTQKSLSLSPGGGGSGGGGSEVQLVQSGAEVKKPGESLKISCKTSEYSFTSYWIGWVRQMPGKGLEWMGIIYLGDSDTRYSPSFQGQVTISADKSISTAYLQWSSLKASDTAMYYCARSNWGLDYWGQGTLVTVSSQPKANPTVTLFPPSSEELQANKATLVCLISDFYPGAVTVAWKADGSPVKAGVETTKPSKQSNNKYAAESYLSLTPEQWKSHRSYSCQVTHEGSTVEKTVAPTECS

SEQ ID NO: 263 - protein, 215 aa, synthetic construct; identical to SEQ ID NO: 192
  REGION 1..215: note = source = /note="Description of Artificial Sequence: Synthetic polypeptide"

SEQ ID NO: 264 - protein, 211 aa, synthetic construct; identical to SEQ ID NO: 114
  REGION 1..211: note = source = /note="Description of Artificial Sequence: Synthetic polypeptide"

SEQ ID NO: 265 - DNA, 2058 bp, synthetic construct
  misc_feature 1..2058: note = source = /note="Description of Artificial Sequence: Synthetic polynucleotide"
  source 1..2058: mol_type = other DNA
caggtgcagctgcaggagtcgggcccaggactggtgaagccttcggagaccctgtccctcacctgcactgtctctggtggctccatcagtagttacttctggagctggattcggcagcccccaggtaagggactggagtggattggctatatctattacagtgggcagaccaaatacaacccctccctcaagagtcgagtcaccatatcaatagacacgtccaagaaccagttctccctgaagctgagctctgtgaccgctgcggacacggccgtgtattactgtgcgagagaaactgggagctactacggctttgactactggggccagggaaccctggtcaccgtctcctcaacggtggctgcaccatctgtcttcatcttcccgccatctgatgagcagttgaaatctggaactgcctctgttgtgtgcctgctgaataacttctatcccagagaggccaaagtacagtggaaggtggataacgccctccaatcgggtaactcccaggagagtgtcacagagcaggacagcaaggacagcacctacagcctcaagagcaccctgacgctgagcaaagcagactacgagaaacacaaagtctacgcctgcgaagtcacccatcagggcctgagctcgcccgtcacaaagagcttcaacaggggagagtgtgacaaaactcacacatgcccaccgtgcccagcacctgaactcctggggggaccgtcagtcttcctcttccccccaaaacccaaggacaccctcatgatctcccggacccctgaggtcacatgcgtggtggtggacgtgagccacgaagaccctgaggtcaagttcaactggtacgtggacggcgtggaggtgcataatgccaagacaaagccgtgtgaggagcagtacggcagcacgtaccgttgtgtcagcgtcctcaccgtcctgcaccaggactggctgaatggcaaggagtacaagtgcaaggtctccaacaaagccctcccagcccccatcgagaaaaccatctccaaagccaaagggcagccccgagaaccacaggtgtacaccctgcccccatcccgggaggagatgaccaagaaccaggtcagcctgacctgcctggtcaaaggcttctatcccagcgacatcgccgtggagtgggagagcaatgggcagccggagaacaactacaagaccacgcctcccgtgctggactccgacggctccttcttcctctatagcaagctcaccgtggacaagagcaggtggcagcaggggaacgtcttctcatgctccgtgatgcatgaggctctgcacaaccactacacgcagaagagcctctccctgtctccgggtggtggcggatcgggaggtggcggatccgaggtacaactggtggaatcaggtggaggtttggtgcagccggggagatcgctcaggcttagctgtgcggcatcggggtttactttcgatgattatgcgatgcattgggtccggcaagcgcctggaaaagggctcgagtgggtttccgccattacgtggaatagcggacacatcgattatgcagacagtgtggagggcagattcacaatctcacgagacaatgctaagaacagcctgtaccttcagatgaactcacttcgcgcggaagataccgccgtatactactgcgccaaagtctcctacttgtctacagcttcgtcgctcgactattggggtcaaggaacgttggtcaccgtctctagtactgtggctgcaccatctgtcttcatcttcccgccatctgatgagcagttgaaatctggaactgcctctgttgtgtgcctgctgaataacttctatcccagagaggccaaagtacagtggaaggtggataacgccctccaatcgggtaactcccaggagagtgtcacagagcaggacagcaaggacagcacctacagcctcgaaagcaccctgacgctgagcaaagcagactacgagaaacacaaagtctacgcctgcgaagtcacccatcagggcctgagctcgcccgtcacaaagagcttcaacaggggagagtgt

SEQ ID NO: 266 - DNA, 633 bp, synthetic construct; identical to SEQ ID NO: 183
  misc_feature 1..633: note = source = /note="Description of Artificial Sequence: Synthetic polynucleotide"
  source 1..633: mol_type = other DNA

SEQ ID NO: 267 - DNA, 633 bp, synthetic construct; identical to SEQ ID NO: 123
  misc_feature 1..633: note = source = /note="Description of Artificial Sequence: Synthetic polynucleotide"
  source 1..633: mol_type = other DNA

SEQ ID NO: 268 - protein, 686 aa, synthetic construct
  REGION 1..686: note = source = /note="Description of Artificial Sequence: Synthetic polypeptide"
QVQLQESGPGLVKPSETLSLTCTVSGGSISSYFWSWIRQPPGKGLEWIGYIYYSGQTKYNPSLKSRVTISIDTSKNQFSLKLSSVTAADTAVYYCARETGSYYGFDYWGQGTLVTVSSTVAAPSVFIFPPSDEQLKSGTASVVCLLNNFYPREAKVQWKVDNALQSGNSQESVTEQDSKDSTYSLKSTLTLSKADYEKHKVYACEVTHQGLSSPVTKSFNRGECDKTHTCPPCPAPELLGGPSVFLFPPKPKDTLMISRTPEVTCVVVDVSHEDPEVKFNWYVDGVEVHNAKTKPCEEQYGSTYRCVSVLTVLHQDWLNGKEYKCKVSNKALPAPIEKTISKAKGQPREPQVYTLPPSREEMTKNQVSLTCLVKGFYPSDIAVEWESNGQPENNYKTTPPVLDSDGSFFLYSKLTVDKSRWQQGNVFSCSVMHEALHNHYTQKSLSLSPGGGGSGGGGSEVQLVESGGGLVQPGRSLRLSCAASGFTFDDYAMHWVRQAPGKGLEWVSAITWNSGHIDYADSVEGRFTISRDNAKNSLYLQMNSLRAEDTAVYYCAKVSYLSTASSLDYWGQGTLVTVSSTVAAPSVFIFPPSDEQLKSGTASVVCLLNNFYPREAKVQWKVDNALQSGNSQESVTEQDSKDSTYSLESTLTLSKADYEKHKVYACEVTHQGLSSPVTKSFNRGEC

SEQ ID NO: 269 - protein, 211 aa, synthetic construct; identical to SEQ ID NO: 186
  REGION 1..211: note = source = /note="Description of Artificial Sequence: Synthetic polypeptide"

SEQ ID NO: 270 - protein, 211 aa, synthetic construct; identical to SEQ ID NO: 126
  REGION 1..211: note = source = /note="Description of Artificial Sequence: Synthetic polypeptide"

SEQ ID NO: 271 - DNA, 2040 bp, synthetic construct
  misc_feature 1..2040: note = source = /note="Description of Artificial Sequence: Synthetic polynucleotide"
  source 1..2040: mol_type = other DNA
caggtgcagctgcaggagtcgggcccaggactggtgaagccttcggagaccctgtccctcacctgcactgtctctggtggctccatcagtagttacttctggagctggattcggcagcccccaggtaagggactggagtggattggctatatctattacagtgggcagaccaaatacaacccctccctcaagagtcgagtcaccatatcaatagacacgtccaagaaccagttctccctgaagctgagctctgtgaccgctgcggacacggccgtgtattactgtgcgagagaaactgggagctactacggctttgactactggggccagggaaccctggtcaccgtctcctcaacggtggctgcaccatctgtcttcatcttcccgccatctgatgagcagttgaaatctggaactgcctctgttgtgtgcctgctgaataacttctatcccagagaggccaaagtacagtggaaggtggataacgccctccaatcgggtaactcccaggagagtgtcacagagcaggacagcaaggacagcacctacagcctcaagagcaccctgacgctgagcaaagcagactacgagaaacacaaagtctacgcctgcgaagtcacccatcagggcctgagctcgcccgtcacaaagagcttcaacaggggagagtgtgacaaaactcacacatgcccaccgtgcccagcacctgaactcctggggggaccgtcagtcttcctcttccccccaaaacccaaggacaccctcatgatctcccggacccctgaggtcacatgcgtggtggtggacgtgagccacgaagaccctgaggtcaagttcaactggtacgtggacggcgtggaggtgcataatgccaagacaaagccgtgtgaggagcagtacggcagcacgtaccgttgtgtcagcgtcctcaccgtcctgcaccaggactggctgaatggcaaggagtacaagtgcaaggtctccaacaaagccctcccagcccccatcgagaaaaccatctccaaagccaaagggcagccccgagaaccacaggtgtacaccctgcccccatcccgggaggagatgaccaagaaccaggtcagcctgacctgcctggtcaaaggcttctatcccagcgacatcgccgtggagtgggagagcaatgggcagccggagaacaactacaagaccacgcctcccgtgctggactccgacggctccttcttcctctatagcaagctcaccgtggacaagagcaggtggcagcaggggaacgtcttctcatgctccgtgatgcatgaggctctgcacaaccactacacgcagaagagcctctccctgtctccgggtggtggcggatcgggaggtggcggatccgaggtgcagctggtgcagtctggagcagaggtgaaaaagcccggggagtctctgaagatctcctgtaagacttctgaatacagctttaccagctactggatcggctgggtgcgccagatgcccgggaaaggcctggagtggatggggatcatctatcttggtgactcagataccagatacagcccgtccttccaaggccaggtcaccatctcagccgacaagtccatcagtaccgcctacctgcagtggagcagcctgaaggcctcggacaccgccatgtattactgtgcgagaagtaactggggtcttgactactggggccagggaaccctggtcaccgtctctagtcagcccaaggccaaccccactgtcactctgttcccgccctcctctgaggagctccaagccaacaaggccacactagtgtgtctgatcagtgacttctacccgggagctgtgacagtggcctggaaggcagatggcagccccgtcaaggcgggagtggagaccaccaaaccctccaaacagagcaacaacaagtacgcggccgagagctacctgagcctgacgcccgagcagtggaagtcccacagaagctacagctgccaggtcacgcatgaagggagcaccgtggagaagacagtggcccctacagaatgttca

SEQ ID NO: 272 - DNA, 645 bp, synthetic construct; identical to SEQ ID NO: 189
  misc_feature 1..645: note = source = /note="Description of Artificial Sequence: Synthetic polynucleotide"
  source 1..645: mol_type = other DNA

SEQ ID NO: 273 - DNA, 633 bp, synthetic construct; identical to SEQ ID NO: 123
  misc_feature 1..633: note = source = /note="Description of Artificial Sequence: Synthetic polynucleotide"
  source 1..633: mol_type = other DNA

SEQ ID NO: 274 - protein, 680 aa, synthetic construct
  REGION 1..680: note = source = /note="Description of Artificial Sequence: Synthetic polypeptide"
QVQLQESGPGLVKPSETLSLTCTVSGGSISSYFWSWIRQPPGKGLEWIGYIYYSGQTKYNPSLKSRVTISIDTSKNQFSLKLSSVTAADTAVYYCARETGSYYGFDYWGQGTLVTVSSTVAAPSVFIFPPSDEQLKSGTASVVCLLNNFYPREAKVQWKVDNALQSGNSQESVTEQDSKDSTYSLKSTLTLSKADYEKHKVYACEVTHQGLSSPVTKSFNRGECDKTHTCPPCPAPELLGGPSVFLFPPKPKDTLMISRTPEVTCVVVDVSHEDPEVKFNWYVDGVEVHNAKTKPCEEQYGSTYRCVSVLTVLHQDWLNGKEYKCKVSNKALPAPIEKTISKAKGQPREPQVYTLPPSREEMTKNQVSLTCLVKGFYPSDIAVEWESNGQPENNYKTTPPVLDSDGSFFLYSKLTVDKSRWQQGNVFSCSVMHEALHNHYTQKSLSLSPGGGGSGGGGSEVQLVQSGAEVKKPGESLKISCKTSEYSFTSYWIGWVRQMPGKGLEWMGIIYLGDSDTRYSPSFQGQVTISADKSISTAYLQWSSLKASDTAMYYCARSNWGLDYWGQGTLVTVSSQPKANPTVTLFPPSSEELQANKATLVCLISDFYPGAVTVAWKADGSPVKAGVETTKPSKQSNNKYAAESYLSLTPEQWKSHRSYSCQVTHEGSTVEKTVAPTECS

SEQ ID NO: 275 - protein, 215 aa, synthetic construct; identical to SEQ ID NO: 192
  REGION 1..215: note = source = /note="Description of Artificial Sequence: Synthetic polypeptide"

SEQ ID NO: 276 - protein, 211 aa, synthetic construct; identical to SEQ ID NO: 126
  REGION 1..211: note = source = /note="Description of Artificial Sequence: Synthetic polypeptide"

SEQ ID NO: 277 - DNA, 2079 bp, synthetic construct
  misc_feature 1..2079: note = source = /note="Description of Artificial Sequence: Synthetic polynucleotide"
  source 1..2079: mol_type = other DNA
caggtacagttgcaggagtcaggtccaggactggtgaagccctcggagaccctctcactcacctgtaccatctccggggacagtgtctctaccaacagtgttgcttggaactggattaggcagcccccagggaaaggccttgagtggataggaaggacatactacaggtccaagtggtataatgattatgcagtttctctgaaaagtcgagtaaccatcagcccagacacatccaagaaccagttctccctgaagctgagctctgtgactgccgcggacacggctgtgtattactgtgcaagagaggatggggatagctactaccgctacggtatggacgtctggggccaagggaccacggtcaccgtctcctcaacggtggctgcaccatctgtcttcatcttcccgccatctgatgagcagttgaaatctggaactgcctctgttgtgtgcctgctgaataacttctatcccagagaggccaaagtacagtggaaggtggataacgccctccaatcgggtaactcccaggagagtgtcacagagcaggacagcaaggacagcacctacagcctcaagagcaccctgacgctgagcaaagcagactacgagaaacacaaagtctacgcctgcgaagtcacccatcagggcctgagctcgcccgtcacaaagagcttcaacaggggagagtgtgacaaaactcacacatgcccaccgtgcccagcacctgaactcctggggggaccgtcagtcttcctcttccccccaaaacccaaggacaccctcatgatctcccggacccctgaggtcacatgcgtggtggtggacgtgagccacgaagaccctgaggtcaagttcaactggtacgtggacggcgtggaggtgcataatgccaagacaaagccgtgtgaggagcagtacggcagcacgtaccgttgtgtcagcgtcctcaccgtcctgcaccaggactggctgaatggcaaggagtacaagtgcaaggtctccaacaaagccctcccagcccccatcgagaaaaccatctccaaagccaaagggcagccccgagaaccacaggtgtacaccctgcccccatcccgggaggagatgaccaagaaccaggtcagcctgacctgcctggtcaaaggcttctatcccagcgacatcgccgtggagtgggagagcaatgggcagccggagaacaactacaagaccacgcctcccgtgctggactccgacggctccttcttcctctatagcaagctcaccgtggacaagagcaggtggcagcaggggaacgtcttctcatgctccgtgatgcatgaggctctgcacaaccactacacgcagaagagcctctccctgtctccgggtggtggcggatcgggaggtggcggatccgaggtacaactggtggaatcaggtggaggtttggtgcagccggggagatcgctcaggcttagctgtgcggcatcggggtttactttcgatgattatgcgatgcattgggtccggcaagcgcctggaaaagggctcgagtgggtttccgccattacgtggaatagcggacacatcgattatgcagacagtgtggagggcagattcacaatctcacgagacaatgctaagaacagcctgtaccttcagatgaactcacttcgcgcggaagataccgccgtatactactgcgccaaagtctcctacttgtctacagcttcgtcgctcgactattggggtcaaggaacgttggtcaccgtctctagtactgtggctgcaccatctgtcttcatcttcccgccatctgatgagcagttgaaatctggaactgcctctgttgtgtgcctgctgaataacttctatcccagagaggccaaagtacagtggaaggtggataacgccctccaatcgggtaactcccaggagagtgtcacagagcaggacagcaaggacagcacctacagcctcgaaagcaccctgacgctgagcaaagcagactacgagaaacacaaagtctacgcctgcgaagtcacccatcagggcctgagctcgcccgtcacaaagagcttcaacaggggagagtgt

SEQ ID NO: 278 - DNA, 633 bp, synthetic construct; identical to SEQ ID NO: 183
  misc_feature 1..633: note = source = /note="Description of Artificial Sequence: Synthetic polynucleotide"
  source 1..633: mol_type = other DNA

SEQ ID NO: 279 - DNA, 651 bp, synthetic construct; identical to SEQ ID NO: 135
  misc_feature 1..651: note = source = /note="Description of Artificial Sequence: Synthetic polynucleotide"
  source 1..651: mol_type = other DNA

SEQ ID NO: 280 - protein, 693 aa, synthetic construct
  REGION 1..693: note = source = /note="Description of Artificial Sequence: Synthetic polypeptide"
QVQLQESGPGLVKPSETLSLTCTISGDSVSTNSVAWNWIRQPPGKGLEWIGRTYYRSKWYNDYAVSLKSRVTISPDTSKNQFSLKLSSVTAADTAVYYCAREDGDSYYRYGMDVWGQGTTVTVSSTVAAPSVFIFPPSDEQLKSGTASVVCLLNNFYPREAKVQWKVDNALQSGNSQESVTEQDSKDSTYSLKSTLTLSKADYEKHKVYACEVTHQGLSSPVTKSFNRGECDKTHTCPPCPAPELLGGPSVFLFPPKPKDTLMISRTPEVTCVVVDVSHEDPEVKFNWYVDGVEVHNAKTKPCEEQYGSTYRCVSVLTVLHQDWLNGKEYKCKVSNKALPAPIEKTISKAKGQPREPQVYTLPPSREEMTKNQVSLTCLVKGFYPSDIAVEWESNGQPENNYKTTPPVLDSDGSFFLYSKLTVDKSRWQQGNVFSCSVMHEALHNHYTQKSLSLSPGGGGSGGGGSEVQLVESGGGLVQPGRSLRLSCAASGFTFDDYAMHWVRQAPGKGLEWVSAITWNSGHIDYADSVEGRFTISRDNAKNSLYLQMNSLRAEDTAVYYCAKVSYLSTASSLDYWGQGTLVTVSSTVAAPSVFIFPPSDEQLKSGTASVVCLLNNFYPREAKVQWKVDNALQSGNSQESVTEQDSKDSTYSLESTLTLSKADYEKHKVYACEVTHQGLSSPVTKSFNRGEC

SEQ ID NO: 281 - protein, 211 aa, synthetic construct; identical to SEQ ID NO: 186
  REGION 1..211: note = source = /note="Description of Artificial Sequence: Synthetic polypeptide"

SEQ ID NO: 282 - protein, 217 aa, synthetic construct; identical to SEQ ID NO: 138
  REGION 1..217: note = source = /note="Description of Artificial Sequence: Synthetic polypeptide"

SEQ ID NO: 283 - DNA, 2061 bp, synthetic construct
  misc_feature 1..2061: note = source = /note="Description of Artificial Sequence: Synthetic polynucleotide"
  source 1..2061: mol_type = other DNA
caggtacagttgcaggagtcaggtccaggactggtgaagccctcggagaccctctcactcacctgtaccatctccggggacagtgtctctaccaacagtgttgcttggaactggattaggcagcccccagggaaaggccttgagtggataggaaggacatactacaggtccaagtggtataatgattatgcagtttctctgaaaagtcgagtaaccatcagcccagacacatccaagaaccagttctccctgaagctgagctctgtgactgccgcggacacggctgtgtattactgtgcaagagaggatggggatagctactaccgctacggtatggacgtctggggccaagggaccacggtcaccgtctcctcaacggtggctgcaccatctgtcttcatcttcccgccatctgatgagcagttgaaatctggaactgcctctgttgtgtgcctgctgaataacttctatcccagagaggccaaagtacagtggaaggtggataacgccctccaatcgggtaactcccaggagagtgtcacagagcaggacagcaaggacagcacctacagcctcaagagcaccctgacgctgagcaaagcagactacgagaaacacaaagtctacgcctgcgaagtcacccatcagggcctgagctcgcccgtcacaaagagcttcaacaggggagagtgtgacaaaactcacacatgcccaccgtgcccagcacctgaactcctggggggaccgtcagtcttcctcttccccccaaaacccaaggacaccctcatgatctcccggacccctgaggtcacatgcgtggtggtggacgtgagccacgaagaccctgaggtcaagttcaactggtacgtggacggcgtggaggtgcataatgccaagacaaagccgtgtgaggagcagtacggcagcacgtaccgttgtgtcagcgtcctcaccgtcctgcaccaggactggctgaatggcaaggagtacaagtgcaaggtctccaacaaagccctcccagcccccatcgagaaaaccatctccaaagccaaagggcagccccgagaaccacaggtgtacaccctgcccccatcccgggaggagatgaccaagaaccaggtcagcctgacctgcctggtcaaaggcttctatcccagcgacatcgccgtggagtgggagagcaatgggcagccggagaacaactacaagaccacgcctcccgtgctggactccgacggctccttcttcctctatagcaagctcaccgtggacaagagcaggtggcagcaggggaacgtcttctcatgctccgtgatgcatgaggctctgcacaaccactacacgcagaagagcctctccctgtctccgggtggtggcggatcgggaggtggcggatccgaggtgcagctggtgcagtctggagcagaggtgaaaaagcccggggagtctctgaagatctcctgtaagacttctgaatacagctttaccagctactggatcggctgggtgcgccagatgcccgggaaaggcctggagtggatggggatcatctatcttggtgactcagataccagatacagcccgtccttccaaggccaggtcaccatctcagccgacaagtccatcagtaccgcctacctgcagtggagcagcctgaaggcctcggacaccgccatgtattactgtgcgagaagtaactggggtcttgactactggggccagggaaccctggtcaccgtctctagtcagcccaaggccaaccccactgtcactctgttcccgccctcctctgaggagctccaagccaacaaggccacactagtgtgtctgatcagtgacttctacccgggagctgtgacagtggcctggaaggcagatggcagccccgtcaaggcgggagtggagaccaccaaaccctccaaacagagcaacaacaagtacgcggccgagagctacctgagcctgacgcccgagcagtggaagtcccacagaagctacagctgccaggtcacgcatgaagggagcaccgtggagaagacagtggcccctacagaatgttca

SEQ ID NO: 284 - DNA, 645 bp, synthetic construct; identical to SEQ ID NO: 189
  misc_feature 1..645: note = source = /note="Description of Artificial Sequence: Synthetic polynucleotide"
  source 1..645: mol_type = other DNA

SEQ ID NO: 285 - DNA, 651 bp, synthetic construct; identical to SEQ ID NO: 135
  misc_feature 1..651: note = source = /note="Description of Artificial Sequence: Synthetic polynucleotide"
  source 1..651: mol_type = other DNA

SEQ ID NO: 286 - protein, 687 aa, synthetic construct
  REGION 1..687: note = source = /note="Description of Artificial Sequence: Synthetic polypeptide"
QVQLQESGPGLVKPSETLSLTCTISGDSVSTNSVAWNWIRQPPGKGLEWIGRTYYRSKWYNDYAVSLKSRVTISPDTSKNQFSLKLSSVTAADTAVYYCAREDGDSYYRYGMDVWGQGTTVTVSSTVAAPSVFIFPPSDEQLKSGTASVVCLLNNFYPREAKVQWKVDNALQSGNSQESVTEQDSKDSTYSLKSTLTLSKADYEKHKVYACEVTHQGLSSPVTKSFNRGECDKTHTCPPCPAPELLGGPSVFLFPPKPKDTLMISRTPEVTCVVVDVSHEDPEVKFNWYVDGVEVHNAKTKPCEEQYGSTYRCVSVLTVLHQDWLNGKEYKCKVSNKALPAPIEKTISKAKGQPREPQVYTLPPSREEMTKNQVSLTCLVKGFYPSDIAVEWESNGQPENNYKTTPPVLDSDGSFFLYSKLTVDKSRWQQGNVFSCSVMHEALHNHYTQKSLSLSPGGGGSGGGGSEVQLVQSGAEVKKPGESLKISCKTSEYSFTSYWIGWVRQMPGKGLEWMGIIYLGDSDTRYSPSFQGQVTISADKSISTAYLQWSSLKASDTAMYYCARSNWGLDYWGQGTLVTVSSQPKANPTVTLFPPSSEELQANKATLVCLISDFYPGAVTVAWKADGSPVKAGVETTKPSKQSNNKYAAESYLSLTPEQWKSHRSYSCQVTHEGSTVEKTVAPTECS

SEQ ID NO: 287 - protein, 215 aa, synthetic construct; identical to SEQ ID NO: 192
  REGION 1..215: note = source = /note="Description of Artificial Sequence: Synthetic polypeptide"

SEQ ID NO: 288 - protein, 217 aa, synthetic construct; identical to SEQ ID NO: 138
  REGION 1..217: note = source = /note="Description of Artificial Sequence: Synthetic polypeptide"

SEQ ID NO: 289 - DNA, 642 bp, synthetic construct
  misc_feature 1..642: note = source = /note="Description of Artificial Sequence: Synthetic polynucleotide"
  source 1..642: mol_type = other DNA
gatatccaaatgacacaatcaccatcgtcgctttcagcgtctgttggcgaccgtgtgacgattacctgtcgcgcgtcccagggaatccggaattacctcgcatggtatcaggaaaaacccggaaaagcaccgaagctcctgatctatgccgcctcgactcttcagagtggtgtgccgtcgaggtttagcgggtccgggtcaggtacggactttactctcacaatttccagcctgcagcccgaagatgtagctacctattactgccagagatacaaccgagcgccttacacattcggacaagggacaaaagtcgagatcaagcgtacggtggctgcaccatctgtcttcatcttcccgccatctgatgagcagttgaaatctggaactgcctctgttgtgtgcctgctgaataacttctatcccagagaggccaaagtacagtggaaggtggataacgccctccaatcgggtaactcccaggagagtgtcacagagcaggacagcaaggacagcacctacagcctcgaaagcaccctgacgctgagcaaagcagactacgagaaacacaaagtctacgcctgcgaagtcacccatcagggcctgagctcgcccgtcacaaagagcttcaacaggggagagtgt

SEQ ID NO: 290 - DNA, 642 bp, synthetic construct
  misc_feature 1..642: note = source = /note="Description of Artificial Sequence: Synthetic polynucleotide"
  source 1..642: mol_type = other DNA
gaaattgtgttgacgcagtctccaggcaccctgtctttgtctccaggggaaagagccaccctctcctgcagggccagtcagagtgttagaagcagttacttagcctggtaccaggagaaacctggccaggctcccaggctcctcatctatggtgcatccagcagggccactggcatcccagacaggttcagtggcagtgggtctgggacagacttcactctcaccatcagcagactggagcctgaagattttgcagtgtattactgtcagcagtatggtagctcacctaccttcggccaagggacacgactggagattaaacgaacggtggctgcaccatctgtcttcatcttcccgccatctgatgagcagttgaaatctggtaccgcctctgttgtgtgcctgctgaataacttctatcccagagaggccaaagtacagtggaaggtggataacgccctccaatcgggtaactcccaggagagtgtcacagagcaggacagcaaggacagcacctacagcctcaagagcaccctgacgctgagcaaagcagactacgagaaacacaaagtctacgcctgcgaagtcacccatcagggcctgagctcgcccgtcacaaagagcttcaacaggggagagtgt

SEQ ID NO: 291 - DNA, 2046 bp, synthetic construct
  misc_feature 1..2046: note = source = /note="Description of Artificial Sequence: Synthetic polynucleotide"
  source 1..2046: mol_type = other DNA
gaggtacaactggtggaatcaggtggaggtttggtgcagccggggagatcgctcaggcttagctgtgcggcatcggggtttactttcgatgattatgcgatgcattgggtccggaaagcgcctggaaaagggctcgagtgggtttccgccattacgtggaatagcggacacatcgattatgcagacagtgtggagggcagattcacaatctcacgagacaatgctaagaacagcctgtaccttcagatgaactcacttcgcgcggaagataccgccgtatactactgcgccaaagtctcctacttgtctacagcttcgtcgctcgactattggggtcaaggaacgttggtcaccgtctctagtgcctccaccaagggcccatcggtcttccccctggcaccctcctccaagagcacctctgggggcacagcggccctgggctgcctggtcaaggactacttccccgaaccggtgacggtgtcgtggaactcaggcgccctgaccagcggcgtgcacaccttcccggctgtcctacagtcctcaggactctactccctcaaaagcgtggtgaccgtgccctccagcagcttgggcacccagacctacatctgcaacgtgaatcacaagcccagcaacaccaaggtggacaagaaagttgagcccaaatcttgtgacaaaactcacacatgcccaccgtgcccagcacctgaactcctggggggaccgtcagtcttcctcttccccccaaaacccaaggacaccctcatgatctcccggacccctgaggtcacatgcgtggtggtggacgtgagccacgaagaccctgaggtcaagttcaactggtacgtggacggcgtggaggtgcataatgccaagacaaagccgtgtgaggagcagtacggcagcacgtaccgttgtgtcagcgtcctcaccgtcctgcaccaggactggctgaatggcaaggagtacaagtgcaaggtctccaacaaagccctcccagcccccatcgagaaaaccatctccaaagccaaagggcagccccgagaaccacaggtgtacaccctgcccccatcccgggaggagatgaccaagaaccaggtcagcctgacctgcctggtcaaaggcttctatcccagcgacatcgccgtggagtgggagagcaatgggcagccggagaacaactacaagaccacgcctcccgtgctggactccgacggctccttcttcctctatagcaagctcaccgtggacaagagcaggtggcagcaggggaacgtcttctcatgctccgtgatgcatgaggctctgcacaaccactacacgcagaagagcctctccctgtctccgggtggtggcggatcgggaggtggcggatcccaggtgcagttacagcagtcgggcgcaggactgttgaagccttcggagaccctgtccctcacctgcgctgtccatggtgggtccttcagtggttactactggaactggattcgcaagccaccagggaaggggctagagtggattggggaaatcaatcatgctggaaacaccaactacaacccgtccctcaagagtcgagtcaccatatcattagacacgtccaagaaccagttctccctgacgctgacctctgtgaccgccgcggacacggctgtgtattactgtgcgagaggatattgtagaagtaccacctgctactttgactactggggccagggaaccctagtcaccgtctcctcagcctccaccaagggcccatcggtcttccccctggcaccctcctccaagagcacctctgggggcacagcggccctgggctgcctggtcaaggactacttccccgaaccggtgacggtgtcgtggaactcaggcgccctgaccagcggcgtgcacaccttcccggctgtcctacagtcctcaggactctactccctcgagagcgtggtgaccgtgccctccagcagcttgggcacccagacctacatctgcaacgtgaatcacaagcccagcaacaccaaggtggacaagaaagttgagcccaaatcttgt

SEQ ID NO: 292 - protein, 214 aa, synthetic construct
  REGION 1..214: note = source = /note="Description of Artificial Sequence: Synthetic polypeptide"
DIQMTQSPSSLSASVGDRVTITCRASQGIRNYLAWYQEKPGKAPKLLIYAASTLQSGVPSRFSGSGSGTDFTLTISSLQPEDVATYYCQRYNRAPYTFGQGTKVEIKRTVAAPSVFIFPPSDEQLKSGTASVVCLLNNFYPREAKVQWKVDNALQSGNSQESVTEQDSKDSTYSLESTLTLSKADYEKHKVYACEVTHQGLSSPVTKSFNRGEC

SEQ ID NO: 293 - protein, 214 aa, synthetic construct
  REGION 1..214: note = source = /note="Description of Artificial Sequence: Synthetic polypeptide"
EIVLTQSPGTLSLSPGERATLSCRASQSVRSSYLAWYQEKPGQAPRLLIYGASSRATGIPDRFSGSGSGTDFTLTISRLEPEDFAVYYCQQYGSSPTFGQGTRLEIKRTVAAPSVFIFPPSDEQLKSGTASVVCLLNNFYPREAKVQWKVDNALQSGNSQESVTEQDSKDSTYSLKSTLTLSKADYEKHKVYACEVTHQGLSSPVTKSFNRGEC

SEQ ID NO: 294 - protein, 682 aa, synthetic construct
  REGION 1..682: note = source = /note="Description of Artificial Sequence: Synthetic polypeptide"
EVQLVESGGGLVQPGRSLRLSCAASGFTFDDYAMHWVRKAPGKGLEWVSAITWNSGHIDYADSVEGRFTISRDNAKNSLYLQMNSLRAEDTAVYYCAKVSYLSTASSLDYWGQGTLVTVSSASTKGPSVFPLAPSSKSTSGGTAALGCLVKDYFPEPVTVSWNSGALTSGVHTFPAVLQSSGLYSLKSVVTVPSSSLGTQTYICNVNHKPSNTKVDKKVEPKSCDKTHTCPPCPAPELLGGPSVFLFPPKPKDTLMISRTPEVTCVVVDVSHEDPEVKFNWYVDGVEVHNAKTKPCEEQYGSTYRCVSVLTVLHQDWLNGKEYKCKVSNKALPAPIEKTISKAKGQPREPQVYTLPPSREEMTKNQVSLTCLVKGFYPSDIAVEWESNGQPENNYKTTPPVLDSDGSFFLYSKLTVDKSRWQQGNVFSCSVMHEALHNHYTQKSLSLSPGGGGSGGGGSQVQLQQSGAGLLKPSETLSLTCAVHGGSFSGYYWNWIRKPPGKGLEWIGEINHAGNTNYNPSLKSRVTISLDTSKNQFSLTLTSVTAADTAVYYCARGYCRSTTCYFDYWGQGTLVTVSSASTKGPSVFPLAPSSKSTSGGTAALGCLVKDYFPEPVTVSWNSGALTSGVHTFPAVLQSSGLYSLESVVTVPSSSLGTQTYICNVNHKPSNTKVDKKVEPKSC

SEQ ID NO: 295 - DNA, 642 bp, synthetic construct; identical to SEQ ID NO: 289
  misc_feature 1..642: note = source = /note="Description of Artificial Sequence: Synthetic polynucleotide"
  source 1..642: mol_type = other DNA

SEQ ID NO: 296 - DNA, 642 bp, synthetic construct
  misc_feature 1..642: note = source = /note="Description of Artificial Sequence: Synthetic polynucleotide"
  source 1..642: mol_type = other DNA
gacatccagatgacccagtctccatcctccctgtctgcatctgtaggagacagagtcaccatcacttgccgggcaagtcagagcattaacaactatttaaattggtatcaggagagaccagggaaagcccctaagctcctgatctatgctgcatccagtttgcaaagtggggtcccatcaaggttcagtggcagtggatctgggacagatttcactctcaccatcagcagtctgcaacctgaagattttgcaacttactactgtcaacagagttacagtacccctcggacgttcggccaagggaccaagctggaaatcaaacgaacggtggctgcaccatctgtcttcatcttcccgccatctgatgagcagttgaaatctggtaccgcctctgttgtgtgcctgctgaataacttctatcccagagaggccaaagtacagtggaaggtggataacgccctccaatcgggtaactcccaggagagtgtcacagagcaggacagcaaggacagcacctacagcctcaagagcaccctgacgctgagcaaagcagactacgagaaacacaaagtctacgcctgcgaagtcacccatcagggcctgagctcgcccgtcacaaagagcttcaacaggggagagtgt

SEQ ID NO: 297 - DNA, 2040 bp, synthetic construct
  misc_feature 1..2040: note = source = /note="Description of Artificial Sequence: Synthetic polynucleotide"
  source 1..2040: mol_type = other DNA
gaggtacaactggtggaatcaggtggaggtttggtgcagccggggagatcgctcaggcttagctgtgcggcatcggggtttactttcgatgattatgcgatgcattgggtccggaaagcgcctggaaaagggctcgagtgggtttccgccattacgtggaatagcggacacatcgattatgcagacagtgtggagggcagattcacaatctcacgagacaatgctaagaacagcctgtaccttcagatgaactcacttcgcgcggaagataccgccgtatactactgcgccaaagtctcctacttgtctacagcttcgtcgctcgactattggggtcaaggaacgttggtcaccgtctctagtgcctccaccaagggcccatcggtcttccccctggcaccctcctccaagagcacctctgggggcacagcggccctgggctgcctggtcaaggactacttccccgaaccggtgacggtgtcgtggaactcaggcgccctgaccagcggcgtgcacaccttcccggctgtcctacagtcctcaggactctactccctcaaaagcgtggtgaccgtgccctccagcagcttgggcacccagacctacatctgcaacgtgaatcacaagcccagcaacaccaaggtggacaagaaagttgagcccaaatcttgtgacaaaactcacacatgcccaccgtgcccagcacctgaactcctggggggaccgtcagtcttcctcttccccccaaaacccaaggacaccctcatgatctcccggacccctgaggtcacatgcgtggtggtggacgtgagccacgaagaccctgaggtcaagttcaactggtacgtggacggcgtggaggtgcataatgccaagacaaagccgtgtgaggagcagtacggcagcacgtaccgttgtgtcagcgtcctcaccgtcctgcaccaggactggctgaatggcaaggagtacaagtgcaaggtctccaacaaagccctcccagcccccatcgagaaaaccatctccaaagccaaagggcagccccgagaaccacaggtgtacaccctgcccccatcccgggaggagatgaccaagaaccaggtcagcctgacctgcctggtcaaaggcttctatcccagcgacatcgccgtggagtgggagagcaatgggcagccggagaacaactacaagaccacgcctcccgtgctggactccgacggctccttcttcctctatagcaagctcaccgtggacaagagcaggtggcagcaggggaacgtcttctcatgctccgtgatgcatgaggctctgcacaaccactacacgcagaagagcctctccctgtctccgggtggtggcggatcgggaggtggcggatcccaggtgcagctgcaggagtcgggcccaggactggtgaagccttcggagaccctgtccctcacctgcactgtctctggtggctccatcagtagttacttctggagctggattcggaagcccccaggtaagggactggagtggattggctatatctattacagtgggcagaccaaatacaacccctccctcaagagtcgagtcaccatatcaatagacacgtccaagaaccagttctccctgaagctgagctctgtgaccgctgcggacacggccgtgtattactgtgcgagagaaactgggagctactacggctttgactactggggccagggaaccctggtcaccgtctcctcagcctccaccaagggcccatcggtcttccccctggcaccctcctccaagagcacctctgggggcacagcggccctgggctgcctggtcaaggactacttccccgaaccggtgacggtgtcgtggaactcaggcgccctgaccagcggcgtgcacaccttcccggctgtcctacagtcctcaggactctactccctcgagagcgtggtgaccgtgccctccagcagcttgggcacccagacctacatctgcaacgtgaatcacaagcccagcaacaccaaggtggacaagaaagttgagcccaaatcttgt

SEQ ID NO: 298 - protein, 214 aa, synthetic construct; identical to SEQ ID NO: 292
  REGION 1..214: note = source = /note="Description of Artificial Sequence: Synthetic polypeptide"

SEQ ID NO: 299 - protein, 214 aa, synthetic construct
  REGION 1..214: note = source = /note="Description of Artificial Sequence: Synthetic polypeptide"
DIQMTQSPSSLSASVGDRVTITCRASQSINNYLNWYQERPGKAPKLLIYAASSLQSGVPSRFSGSGSGTDFTLTISSLQPEDFATYYCQQSYSTPRTFGQGTKLEIKRTVAAPSVFIFPPSDEQLKSGTASVVCLLNNFYPREAKVQWKVDNALQSGNSQESVTEQDSKDSTYSLKSTLTLSKADYEKHKVYACEVTHQGLSSPVTKSFNRGEC

SEQ ID NO: 300 - protein, 680 aa, synthetic construct
  REGION 1..680: note = source = /note="Description of Artificial Sequence: Synthetic polypeptide"
EVQLVESGGGLVQPGRSLRLSCAASGFTFDDYAMHWVRKAPGKGLEWVSAITWNSGHIDYADSVEGRFTISRDNAKNSLYLQMNSLRAEDTAVYYCAKVSYLSTASSLDYWGQGTLVTVSSASTKGPSVFPLAPSSKSTSGGTAALGCLVKDYFPEPVTVSWNSGALTSGVHTFPAVLQSSGLYSLKSVVTVPSSSLGTQTYICNVNHKPSNTKVDKKVEPKSCDKTHTCPPCPAPELLGGPSVFLFPPKPKDTLMISRTPEVTCVVVDVSHEDPEVKFNWYVDGVEVHNAKTKPCEEQYGSTYRCVSVLTVLHQDWLNGKEYKCKVSNKALPAPIEKTISKAKGQPREPQVYTLPPSREEMTKNQVSLTCLVKGFYPSDIAVEWESNGQPENNYKTTPPVLDSDGSFFLYSKLTVDKSRWQQGNVFSCSVMHEALHNHYTQKSLSLSPGGGGSGGGGSQVQLQESGPGLVKPSETLSLTCTVSGGSISSYFWSWIRKPPGKGLEWIGYIYYSGQTKYNPSLKSRVTISIDTSKNQFSLKLSSVTAADTAVYYCARETGSYYGFDYWGQGTLVTVSSASTKGPSVFPLAPSSKSTSGGTAALGCLVKDYFPEPVTVSWNSGALTSGVHTFPAVLQSSGLYSLESVVTVPSSSLGTQTYICNVNHKPSNTKVDKKVEPKSC

SEQ ID NO: 301 - DNA, 642 bp, synthetic construct; identical to SEQ ID NO: 289
  misc_feature 1..642: note = source = /note="Description of Artificial Sequence: Synthetic polynucleotide"
  source 1..642: mol_type = other DNA

SEQ ID NO: 302 - DNA, 660 bp, synthetic construct
  misc_feature 1..660: note = source = /note="Description of Artificial Sequence: Synthetic polynucleotide"
  source 1..660: mol_type = other DNA
gacatccagatgacccagtctccaagctccctgtctgcgtctgtgggcgatagggtcaccatcacttgcaggtccagccagagtgtgttatacagctccaacaataagaactacttagtttggtaccaggagaaaccaggaaaggttcctaaactgctcatttactgggcatctacccgggaatccggggtccctagtcgattcagtggcagcgggtctgggacagatttcactctcaccatcagcagcctgcagcctgaagatgtggcaacttattactgtcagcaatattataagactcctctcactttcggcggagggaccaaggtggagatcaaacgaacggtggctgcaccatctgtcttcatcttcccgccatctgatgagcagttgaaatctggtaccgcctctgttgtgtgcctgctgaataacttctatcccagagaggccaaagtacagtggaaggtggataacgccctccaatcgggtaactcccaggagagtgtcacagagcaggacagcaaggacagcacctacagcctcaagagcaccctgacgctgagcaaagcagactacgagaaacacaaagtctacgcctgcgaagtcacccatcagggcctgagctcgcccgtcacaaagagcttcaacaggggagagtgt

SEQ ID NO: 303 - DNA, 2061 bp, synthetic construct
  misc_feature 1..2061: note = source = /note="Description of Artificial Sequence: Synthetic polynucleotide"
  source 1..2061: mol_type = other DNA
gaggtacaactggtggaatcaggtggaggtttggtgcagccggggagatcgctcaggcttagctgtgcggcatcggggtttactttcgatgattatgcgatgcattgggtccggaaagcgcctggaaaagggctcgagtgggtttccgccattacgtggaatagcggacacatcgattatgcagacagtgtggagggcagattcacaatctcacgagacaatgctaagaacagcctgtaccttcagatgaactcacttcgcgcggaagataccgccgtatactactgcgccaaagtctcctacttgtctacagcttcgtcgctcgactattggggtcaaggaacgttggtcaccgtctctagtgcctccaccaagggcccatcggtcttccccctggcaccctcctccaagagcacctctgggggcacagcggccctgggctgcctggtcaaggactacttccccgaaccggtgacggtgtcgtggaactcaggcgccctgaccagcggcgtgcacaccttcccggctgtcctacagtcctcaggactctactccctcaaaagcgtggtgaccgtgccctccagcagcttgggcacccagacctacatctgcaacgtgaatcacaagcccagcaacaccaaggtggacaagaaagttgagcccaaatcttgtgacaaaactcacacatgcccaccgtgcccagcacctgaactcctggggggaccgtcagtcttcctcttccccccaaaacccaaggacaccctcatgatctcccggacccctgaggtcacatgcgtggtggtggacgtgagccacgaagaccctgaggtcaagttcaactggtacgtggacggcgtggaggtgcataatgccaagacaaagccgtgtgaggagcagtacggcagcacgtaccgttgtgtcagcgtcctcaccgtcctgcaccaggactggctgaatggcaaggagtacaagtgcaaggtctccaacaaagccctcccagcccccatcgagaaaaccatctccaaagccaaagggcagccccgagaaccacaggtgtacaccctgcccccatcccgggaggagatgaccaagaaccaggtcagcctgacctgcctggtcaaaggcttctatcccagcgacatcgccgtggagtgggagagcaatgggcagccggagaacaactacaagaccacgcctcccgtgctggactccgacggctccttcttcctctatagcaagctcaccgtggacaagagcaggtggcagcaggggaacgtcttctcatgctccgtgatgcatgaggctctgcacaaccactacacgcagaagagcctctccctgtctccgggtggtggcggatcgggaggtggcggatcccaggtacagttgcaggagtcaggtccaggactggtgaagccctcggagaccctctcactcacctgtaccatctccggggacagtgtctctaccaacagtgttgcttggaactggattaggaagcccccagggaaaggccttgagtggataggaaggacatactacaggtccaagtggtataatgattatgcagtttctctgaaaagtcgagtaaccatcagcccagacacatccaagaaccagttctccctgaagctgagctctgtgactgccgcggacacggctgtgtattactgtgcaagagaggatggggatagctactaccgctacggtatggacgtctggggccaagggaccacggtcaccgtctcctcagcctccaccaagggcccatcggtcttccccctggcaccctcctccaagagcacctctgggggcacagcggccctgggctgcctggtcaaggactacttccccgaaccggtgacggtgtcgtggaactcaggcgccctgaccagcggcgtgcacaccttcccggctgtcctacagtcctcaggactctactccctcgagagcgtggtgaccgtgccctccagcagcttgggcacccagacctacatctgcaacgtgaatcacaagcccagcaacaccaaggtggacaagaaagttgagcccaaatcttgt

SEQ ID NO: 304 - protein, 214 aa, synthetic construct; identical to SEQ ID NO: 292
  REGION 1..214: note = source = /note="Description of Artificial Sequence: Synthetic polypeptide"

SEQ ID NO: 305 - protein, 220 aa, synthetic construct
  REGION 1..220: note = source = /note="Description of Artificial Sequence: Synthetic polypeptide"
DIQMTQSPSSLSASVGDRVTITCRSSQSVLYSSNNKNYLVWYQEKPGKVPKLLIYWASTRESGVPSRFSGSGSGTDFTLTISSLQPEDVATYYCQQYYKTPLTFGGGTKVEIKRTVAAPSVFIFPPSDEQLKSGTASVVCLLNNFYPREAKVQWKVDNALQSGNSQESVTEQDSKDSTYSLKSTLTLSKADYEKHKVYACEVTHQGLSSPVTKSFNRGEC

SEQ ID NO: 306 - protein, 687 aa, synthetic construct
  REGION 1..687: note = source = /note="Description of Artificial Sequence: Synthetic polypeptide"
EVQLVESGGGLVQPGRSLRLSCAASGFTFDDYAMHWVRKAPGKGLEWVSAITWNSGHIDYADSVEGRFTISRDNAKNSLYLQMNSLRAEDTAVYYCAKVSYLSTASSLDYWGQGTLVTVSSASTKGPSVFPLAPSSKSTSGGTAALGCLVKDYFPEPVTVSWNSGALTSGVHTFPAVLQSSGLYSLKSVVTVPSSSLGTQTYICNVNHKPSNTKVDKKVEPKSCDKTHTCPPCPAPELLGGPSVFLFPPKPKDTLMISRTPEVTCVVVDVSHEDPEVKFNWYVDGVEVHNAKTKPCEEQYGSTYRCVSVLTVLHQDWLNGKEYKCKVSNKALPAPIEKTISKAKGQPREPQVYTLPPSREEMTKNQVSLTCLVKGFYPSDIAVEWESNGQPENNYKTTPPVLDSDGSFFLYSKLTVDKSRWQQGNVFSCSVMHEALHNHYTQKSLSLSPGGGGSGGGGSQVQLQESGPGLVKPSETLSLTCTISGDSVSTNSVAWNWIRKPPGKGLEWIGRTYYRSKWYNDYAVSLKSRVTISPDTSKNQFSLKLSSVTAADTAVYYCAREDGDSYYRYGMDVWGQGTTVTVSSASTKGPSVFPLAPSSKSTSGGTAALGCLVKDYFPEPVTVSWNSGALTSGVHTFPAVLQSSGLYSLESVVTVPSSSLGTQTYICNVNHKPSNTKVDKKVEPKSC

SEQ ID NO: 307 - DNA, 651 bp, synthetic construct
  misc_feature 1..651: note = source = /note="Description of Artificial Sequence: Synthetic polynucleotide"
  source 1..651: mol_type = other DNA
cagtctgtgctgacgcagccgccctcagtgtctggggccccagggcagagggtcaccatctcctgcactgggagcagttccaacatcggggcaggttatgatgtacactggtaccaggagtttccaggaacagcccccaaactcctcatccaaggtaacagcaatcggccctcaggggtccctgaccgattctctggctccaagtctggcacctcagcctccctggccatcactgggctccaggctgaggatgaggctgattattactgccagtcctatgacagcagcctgagtggttcggtgttcggcggagggaccaagctgaccgtcctaggtcagcccaaggctgccccctcggtcactctgttcccgccctcctctgaggagcttcaagccaacaaggccacactggtgtgtctcataagtgacttctacccgggagccgtgacagtggcctggaaggcagatagcagccccgtcaaggcgggagtggagaccaccacaccctccaaacaaagcaacaacaagtacgcggccgagagctatctgagcctgacgcctgagcagtggaagtcccacagaagctacagctgccaggtcacgcatgaagggagcaccgtggagaagacagtggcccctacagaatgttca

SEQ ID NO: 308 - DNA, 642 bp, synthetic construct; identical to SEQ ID NO: 290
  misc_feature 1..642: note = source = /note="Description of Artificial Sequence: Synthetic polynucleotide"
  source 1..642: mol_type = other DNA

SEQ ID NO: 309 - DNA, 2031 bp, synthetic construct
  misc_feature 1..2031: note = source = /note="Description of Artificial Sequence: Synthetic polynucleotide"
  source 1..2031: mol_type = other DNA
gaggtgcagctggtgcagtctggagcagaggtgaaaaagcccggggagtctctgaagatctcctgtaagacttctgaatacagctttaccagctactggatcggctgggtgcgcaagatgcccgggaaaggcctggagtggatggggatcatctatcttggtgactcagataccagatacagcccgtccttccaaggccaggtcaccatctcagccgacaagtccatcagtaccgcctacctgcagtggagcagcctgaaggcctcggacaccgccatgtattactgtgcgagaagtaactggggtcttgactactggggccagggaaccctggtcaccgtctctagtgcctccaccaagggcccatcggtcttccccctggcaccctcctccaagagcacctctgggggcacagcggccctgggctgcctggtcaaggactacttccccgaaccggtgacggtgtcgtggaactcaggcgccctgaccagcggcgtgcacaccttcccggctgtcctacagtcctcaggactctactccctcaaaagcgtggtgaccgtgccctccagcagcttgggcacccagacctacatctgcaacgtgaatcacaagcccagcaacaccaaggtggacaagaaagttgagcccaaatcttgtgacaaaactcacacatgcccaccgtgcccagcacctgaactcctggggggaccgtcagtcttcctcttccccccaaaacccaaggacaccctcatgatctcccggacccctgaggtcacatgcgtggtggtggacgtgagccacgaagaccctgaggtcaagttcaactggtacgtggacggcgtggaggtgcataatgccaagacaaagccgtgtgaggagcagtacggcagcacgtaccgttgtgtcagcgtcctcaccgtcctgcaccaggactggctgaatggcaaggagtacaagtgcaaggtctccaacaaagccctcccagcccccatcgagaaaaccatctccaaagccaaagggcagccccgagaaccacaggtgtacaccctgcccccatcccgggaggagatgaccaagaaccaggtcagcctgacctgcctggtcaaaggcttctatcccagcgacatcgccgtggagtgggagagcaatgggcagccggagaacaactacaagaccacgcctcccgtgctggactccgacggctccttcttcctctatagcaagctcaccgtggacaagagcaggtggcagcaggggaacgtcttctcatgctccgtgatgcatgaggctctgcacaaccactacacgcagaagagcctctccctgtctccgggtggtggcggatcgggaggtggcggatcccaggtgcagttacagcagtcgggcgcaggactgttgaagccttcggagaccctgtccctcacctgcgctgtccatggtgggtccttcagtggttactactggaactggattcgcaagccaccagggaaggggctagagtggattggggaaatcaatcatgctggaaacaccaactacaacccgtccctcaagagtcgagtcaccatatcattagacacgtccaagaaccagttctccctgacgctgacctctgtgaccgccgcggacacggctgtgtattactgtgcgagaggatattgtagaagtaccacctgctactttgactactggggccagggaaccctagtcaccgtctcctcagcctccaccaagggcccatcggtcttccccctggcaccctcctccaagagcacctctgggggcacagcggccctgggctgcctggtcaaggactacttccccgaaccggtgacggtgtcgtggaactcaggcgccctgaccagcggcgtgcacaccttcccggctgtcctacagtcctcaggactctactccctcgagagcgtggtgaccgtgccctccagcagcttgggcacccagacctacatctgcaacgtgaatcacaagcccagcaacaccaaggtggacaagaaagttgagcccaaatcttgt

SEQ ID NO: 310 - protein, 217 aa, synthetic construct
  REGION 1..217: note = source = /note="Description of Artificial Sequence: Synthetic polypeptide"
QSVLTQPPSVSGAPGQRVTISCTGSSSNIGAGYDVHWYQEFPGTAPKLLIQGNSNRPSGVPDRFSGSKSGTSASLAITGLQAEDEADYYCQSYDSSLSGSVFGGGTKLTVLGQPKAAPSVTLFPPSSEELQANKATLVCLISDFYPGAVTVAWKADSSPVKAGVETTTPSKQSNNKYAAESYLSLTPEQWKSHRSYSCQVTHEGSTVEKTVAPTECS

SEQ ID NO: 311 - protein, 214 aa, synthetic construct; identical to SEQ ID NO: 293
  REGION 1..214: note = source = /note="Description of Artificial Sequence: Synthetic polypeptide"

SEQ ID NO: 312 - protein, 677 aa, synthetic construct
  REGION 1..677: note = source = /note="Description of Artificial Sequence: Synthetic polypeptide"
EVQLVQSGAEVKKPGESLKISCKTSEYSFTSYWIGWVRKMPGKGLEWMGIIYLGDSDTRYSPSFQGQVTISADKSISTAYLQWSSLKASDTAMYYCARSNWGLDYWGQGTLVTVSSASTKGPSVFPLAPSSKSTSGGTAALGCLVKDYFPEPVTVSWNSGALTSGVHTFPAVLQSSGLYSLKSVVTVPSSSLGTQTYICNVNHKPSNTKVDKKVEPKSCDKTHTCPPCPAPELLGGPSVFLFPPKPKDTLMISRTPEVTCVVVDVSHEDPEVKFNWYVDGVEVHNAKTKPCEEQYGSTYRCVSVLTVLHQDWLNGKEYKCKVSNKALPAPIEKTISKAKGQPREPQVYTLPPSREEMTKNQVSLTCLVKGFYPSDIAVEWESNGQPENNYKTTPPVLDSDGSFFLYSKLTVDKSRWQQGNVFSCSVMHEALHNHYTQKSLSLSPGGGGSGGGGSQVQLQQSGAGLLKPSETLSLTCAVHGGSFSGYYWNWIRKPPGKGLEWIGEINHAGNTNYNPSLKSRVTISLDTSKNQFSLTLTSVTAADTAVYYCARGYCRSTTCYFDYWGQGTLVTVSSASTKGPSVFPLAPSSKSTSGGTAALGCLVKDYFPEPVTVSWNSGALTSGVHTFPAVLQSSGLYSLESVVTVPSSSLGTQTYICNVNHKPSNTKVDKKVEPKSC

SEQ ID NO: 313 - DNA, 651 bp, synthetic construct; identical to SEQ ID NO: 307
  misc_feature 1..651: note = source = /note="Description of Artificial Sequence: Synthetic polynucleotide"
  source 1..651: mol_type = other DNA

SEQ ID NO: 314 - DNA, 642 bp, synthetic construct; identical to SEQ ID NO: 296
  misc_feature 1..642: note = source = /note="Description of Artificial Sequence: Synthetic polynucleotide"
  source 1..642: mol_type = other DNA

SEQ ID NO: 315 - DNA, 2025 bp, synthetic construct
  misc_feature 1..2025: note = source = /note="Description of Artificial Sequence: Synthetic polynucleotide"
  source 1..2025: mol_type = other DNA
gaggtgcagctggtgcagtctggagcagaggtgaaaaagcccggggagtctctgaagatctcctgtaagacttctgaatacagctttaccagctactggatcggctgggtgcgcaagatgcccgggaaaggcctggagtggatggggatcatctatcttggtgactcagataccagatacagcccgtccttccaaggccaggtcaccatctcagccgacaagtccatcagtaccgcctacctgcagtggagcagcctgaaggcctcggacaccgccatgtattactgtgcgagaagtaactggggtcttgactactggggccagggaaccctggtcaccgtctctagtgcctccaccaagggcccatcggtcttccccctggcaccctcctccaagagcacctctgggggcacagcggccctgggctgcctggtcaaggactacttccccgaaccggtgacggtgtcgtggaactcaggcgccctgaccagcggcgtgcacaccttcccggctgtcctacagtcctcaggactctactccctcaaaagcgtggtgaccgtgccctccagcagcttgggcacccagacctacatctgcaacgtgaatcacaagcccagcaacaccaaggtggacaagaaagttgagcccaaatcttgtgacaaaactcacacatgcccaccgtgcccagcacctgaactcctggggggaccgtcagtcttcctcttccccccaaaacccaaggacaccctcatgatctcccggacccctgaggtcacatgcgtggtggtggacgtgagccacgaagaccctgaggtcaagttcaactggtacgtggacggcgtggaggtgcataatgccaagacaaagccgtgtgaggagcagtacggcagcacgtaccgttgtgtcagcgtcctcaccgtcctgcaccaggactggctgaatggcaaggagtacaagtgcaaggtctccaacaaagccctcccagcccccatcgagaaaaccatctccaaagccaaagggcagccccgagaaccacaggtgtacaccctgcccccatcccgggaggagatgaccaagaaccaggtcagcctgacctgcctggtcaaaggcttctatcccagcgacatcgccgtggagtgggagagcaatgggcagccggagaacaactacaagaccacgcctcccgtgctggactccgacggctccttcttcctctatagcaagctcaccgtggacaagagcaggtggcagcaggggaacgtcttctcatgctccgtgatgcatgaggctctgcacaaccactacacgcagaagagcctctccctgtctccgggtggtggcggatcgggaggtggcggatcccaggtgcagctgcaggagtcgggcccaggactggtgaagccttcggagaccctgtccctcacctgcactgtctctggtggctccatcagtagttacttctggagctggattcggaagcccccaggtaagggactggagtggattggctatatctattacagtgggcagaccaaatacaacccctccctcaagagtcgagtcaccatatcaatagacacgtccaagaaccagttctccctgaagctgagctctgtgaccgctgcggacacggccgtgtattactgtgcgagagaaactgggagctactacggctttgactactggggccagggaaccctggtcaccgtctcctcagcctccaccaagggcccatcggtcttccccctggcaccctcctccaagagcacctctgggggcacagcggccctgggctgcctggtcaaggactacttccccgaaccggtgacggtgtcgtggaactcaggcgccctgaccagcggcgtgcacaccttcccggctgtcctacagtcctcaggactctactccctcgagagcgtggtgaccgtgccctccagcagcttgggcacccagacctacatctgcaacgtgaatcacaagcccagcaacaccaaggtggacaagaaagttgagcccaaatcttgt

SEQ ID NO: 316 - protein, 217 aa, synthetic construct; identical to SEQ ID NO: 310
  REGION 1..217: note = source = /note="Description of Artificial Sequence: Synthetic polypeptide"

SEQ ID NO: 317 - protein, 214 aa, synthetic construct; identical to SEQ ID NO: 299
  REGION 1..214: note = source = /note="Description of Artificial Sequence: Synthetic polypeptide"

SEQ ID NO: 318 - protein, 675 aa, synthetic construct
  REGION 1..675: note = source = /note="Description of Artificial Sequence: Synthetic polypeptide"
EVQLVQSGAEVKKPGESLKISCKTSEYSFTSYWIGWVRKMPGKGLEWMGIIYLGDSDTRYSPSFQGQVTISADKSISTAYLQWSSLKASDTAMYYCARSNWGLDYWGQGTLVTVSSASTKGPSVFPLAPSSKSTSGGTAALGCLVKDYFPEPVTVSWNSGALTSGVHTFPAVLQSSGLYSLKSVVTVPSSSLGTQTYICNVNHKPSNTKVDKKVEPKSCDKTHTCPPCPAPELLGGPSVFLFPPKPKDTLMISRTPEVTCVVVDVSHEDPEVKFNWYVDGVEVHNAKTKPCEEQYGSTYRCVSVLTVLHQDWLNGKEYKCKVSNKALPAPIEKTISKAKGQPREPQVYTLPPSREEMTKNQVSLTCLVKGFYPSDIAVEWESNGQPENNYKTTPPVLDSDGSFFLYSKLTVDKSRWQQGNVFSCSVMHEALHNHYTQKSLSLSPGGGGSGGGGSQVQLQESGPGLVKPSETLSLTCTVSGGSISSYFWSWIRKPPGKGLEWIGYIYYSGQTKYNPSLKSRVTISIDTSKNQFSLKLSSVTAADTAVYYCARETGSYYGFDYWGQGTLVTVSSASTKGPSVFPLAPSSKSTSGGTAALGCLVKDYFPEPVTVSWNSGALTSGVHTFPAVLQSSGLYSLESVVTVPSSSLGTQTYICNVNHKPSNTKVDKKVEPKSC

SEQ ID NO: 319 - DNA, 651 bp, synthetic construct; identical to SEQ ID NO: 307
  misc_feature 1..651: note = source = /note="Description of Artificial Sequence: Synthetic polynucleotide"
  source 1..651: mol_type = other DNA

SEQ ID NO: 320 - DNA, 660 bp, synthetic construct; identical to SEQ ID NO: 302
  misc_feature 1..660: note = source = /note="Description of Artificial Sequence: Synthetic polynucleotide"
  source 1..660: mol_type = other DNA

SEQ ID NO: 321 - DNA, 2046 bp, synthetic construct
  misc_feature 1..2046: note = source = /note="Description of Artificial Sequence: Synthetic polynucleotide"
  source 1..2046: mol_type = other DNA
gaggtgcagctggtgcagtctggagcagaggtgaaaaagcccggggagtctctgaagatctcctgtaagacttctgaatacagctttaccagctactggatcggctgggtgcgcaagatgcccgggaaaggcctggagtggatggggatcatctatcttggtgactcagataccagatacagcccgtccttccaaggccaggtcaccatctcagccgacaagtccatcagtaccgcctacctgcagtggagcagcctgaaggcctcggacaccgccatgtattactgtgcgagaagtaactggggtcttgactactggggccagggaaccctggtcaccgtctctagtgcctccaccaagggcccatcggtcttccccctggcaccctcctccaagagcacctctgggggcacagcggccctgggctgcctggtcaaggactacttccccgaaccggtgacggtgtcgtggaactcaggcgccctgaccagcggcgtgcacaccttcccggctgtcctacagtcctcaggactctactccctcaaaagcgtggtgaccgtgccctccagcagcttgggcacccagacctacatctgcaacgtgaatcacaagcccagcaacaccaaggtggacaagaaagttgagcccaaatcttgtgacaaaactcacacatgcccaccgtgcccagcacctgaactcctggggggaccgtcagtcttcctcttccccccaaaacccaaggacaccctcatgatctcccggacccctgaggtcacatgcgtggtggtggacgtgagccacgaagaccctgaggtcaagttcaactggtacgtggacggcgtggaggtgcataatgccaagacaaagccgtgtgaggagcagtacggcagcacgtaccgttgtgtcagcgtcctcaccgtcctgcaccaggactggctgaatggcaaggagtacaagtgcaaggtctccaacaaagccctcccagcccccatcgagaaaaccatctccaaagccaaagggcagccccgagaaccacaggtgtacaccctgcccccatcccgggaggagatgaccaagaaccaggtcagcctgacctgcctggtcaaaggcttctatcccagcgacatcgccgtggagtgggagagcaatgggcagccggagaacaactacaagaccacgcctcccgtgctggactccgacggctccttcttcctctatagcaagctcaccgtggacaagagcaggtggcagcaggggaacgtcttctcatgctccgtgatgcatgaggctctgcacaaccactacacgcagaagagcctctccctgtctccgggtggtggcggatcgggaggtggcggatcccaggtacagttgcaggagtcaggtccaggactggtgaagccctcggagaccctctcactcacctgtaccatctccggggacagtgtctctaccaacagtgttgcttggaactggattaggaagcccccagggaaaggccttgagtggataggaaggacatactacaggtccaagtggtataatgattatgcagtttctctgaaaagtcgagtaaccatcagcccagacacatccaagaaccagttctccctgaagctgagctctgtgactgccgcggacacggctgtgtattactgtgcaagagaggatggggatagctactaccgctacggtatggacgtctggggccaagggaccacggtcaccgtctcctcagcctccaccaagggcccatcggtcttccccctggcaccctcctccaagagcacctctgggggcacagcggccctgggctgcctggtcaaggactacttccccgaaccggtgacggtgtcgtggaactcaggcgccctgaccagcggcgtgcacaccttcccggctgtcctacagtcctcaggactctactccctcgagagcgtggtgaccgtgccctccagcagcttgggcacccagacctacatctgcaacgtgaatcacaagcccagcaacaccaaggtggacaagaaagttgagcccaaatcttgt

SEQ ID NO: 322 - protein, 217 aa, synthetic construct; identical to SEQ ID NO: 310
  REGION 1..217: note = source = /note="Description of Artificial Sequence: Synthetic polypeptide"

SEQ ID NO: 323 - protein, 220 aa, synthetic construct; identical to SEQ ID NO: 305
  REGION 1..220: note = source = /note="Description of Artificial Sequence: Synthetic polypeptide"

SEQ ID NO: 324 - protein, 682 aa, synthetic construct
  REGION 1..682: note = source = /note="Description of Artificial Sequence: Synthetic polypeptide"
EVQLVQSGAEVKKPGESLKISCKTSEYSFTSYWIGWVRKMPGKGLEWMGIIYLGDSDTRYSPSFQGQVTISADKSISTAYLQWSSLKASDTAMYYCARSNWGLDYWGQGTLVTVSSASTKGPSVFPLAPSSKSTSGGTAALGCLVKDYFPEPVTVSWNSGALTSGVHTFPAVLQSSGLYSLKSVVTVPSSSLGTQTYICNVNHKPSNTKVDKKVEPKSCDKTHTCPPCPAPELLGGPSVFLFPPKPKDTLMISRTPEVTCVVVDVSHEDPEVKFNWYVDGVEVHNAKTKPCEEQYGSTYRCVSVLTVLHQDWLNGKEYKCKVSNKALPAPIEKTISKAKGQPREPQVYTLPPSREEMTKNQVSLTCLVKGFYPSDIAVEWESNGQPENNYKTTPPVLDSDGSFFLYSKLTVDKSRWQQGNVFSCSVMHEALHNHYTQKSLSLSPGGGGSGGGGSQVQLQESGPGLVKPSETLSLTCTISGDSVSTNSVAWNWIRKPPGKGLEWIGRTYYRSKWYNDYAVSLKSRVTISPDTSKNQFSLKLSSVTAADTAVYYCAREDGDSYYRYGMDVWGQGTTVTVSSASTKGPSVFPLAPSSKSTSGGTAALGCLVKDYFPEPVTVSWNSGALTSGVHTFPAVLQSSGLYSLESVVTVPSSSLGTQTYICNVNHKPSNTKVDKKVEPKSC

SEQ ID NO: 325 - DNA, 642 bp, synthetic construct
  misc_feature 1..642: note = source = /note="Description of Artificial Sequence: Synthetic polynucleotide"
  source 1..642: mol_type = other DNA
gaaattgtgttgacgcagtctccaggcaccctgtctttgtctccaggggaaagagccaccctctcctgcagggccagtcagagtgttagaagcagttacttagcctggtaccaggagaaacctggccaggctcccaggctcctcatctatggtgcatccagcagggccactggcatcccagacaggttcagtggcagtgggtctgggacagacttcactctcaccatcagcagactggagcctgaagattttgcagtgtattactgtcagcagtatggtagctcacctaccttcggccaagggacacgactggagattaaacgaacggtggctgcaccatctgtcttcatcttcccgccatctgatgagcagttgaaatctggtaccgcctctgttgtgtgcctgctgaataacttctatcccagagaggccaaagtacagtggaaggtggataacgccctccaatcgggtaactcccaggagagtgtcacagagcaggacagcaaggacagcacctacagcctcgagagcaccctgacgctgagcaaagcagactacgagaaacacaaagtctacgcctgcgaagtcacccatcagggcctgagctcgcccgtcacaaagagcttcaacaggggagagtgt

SEQ ID NO: 326 - DNA, 642 bp, synthetic construct
  misc_feature 1..642: note = source = /note="Description of Artificial Sequence: Synthetic polynucleotide"
  source 1..642: mol_type = other DNA
gatatccaaatgacacaatcaccatcgtcgctttcagcgtctgttggcgaccgtgtgacgattacctgtcgcgcgtcccagggaatccggaattacctcgcatggtatcaggagaaacccggaaaagcaccgaagctcctgatctatgccgcctcgactcttcagagtggtgtgccgtcgaggtttagcgggtccgggtcaggtacggactttactctcacaatttccagcctgcagcccgaagatgtagctacctattactgccagagatacaaccgagcgccttacacattcggacaagggacaaaagtcgagatcaagcgtacggtggctgcaccatctgtcttcatcttcccgccatctgatgagcagttgaaatctggaactgcctctgttgtgtgcctgctgaataacttctatcccagagaggccaaagtacagtggaaggtggataacgccctccaatcgggtaactcccaggagagtgtcacagagcaggacagcaaggacagcacctacagcctcaagagcaccctgacgctgagcaaagcagactacgagaaacacaaagtctacgcctgcgaagtcacccatcagggcctgagctcgcccgtcacaaagagcttcaacaggggagagtgt

SEQ ID NO: 327 - DNA, 2046 bp, synthetic construct
  misc_feature 1..2046: note = source = /note="Description of Artificial Sequence: Synthetic polynucleotide"
  source 1..2046: mol_type = other DNA
caggtgcagttacagcagtcgggcgcaggactgttgaagccttcggagaccctgtccctcacctgcgctgtccatggtgggtccttcagtggttactactggaactggatccgcaagccaccagggaaggggctagagtggattggggaaatcaatcatgctggaaacaccaactacaacccgtccctcaagagtcgagtcaccatatcattagacacgtccaagaaccagttctccctgacgctgacctctgtgaccgccgcggacacggctgtgtattactgtgcgagaggatattgtagaagtaccacctgctactttgactactggggccagggaaccctagtcaccgtctcctcagcctccaccaagggcccatcggtcttccccctggcaccctcctccaagagcacctctgggggcacagcggccctgggctgcctggtcaaggactacttccccgaaccggtgacggtgtcgtggaactcaggcgccctgaccagcggcgtgcacaccttcccggctgtcctacagtcctcaggactctactccctcaaaagcgtggtgaccgtgccctccagcagcttgggcacccagacctacatctgcaacgtgaatcacaagcccagcaacaccaaggtggacaagaaagttgagcccaaatcttgtgacaaaactcacacatgcccaccgtgcccagcacctgaactcctggggggaccgtcagtcttcctcttccccccaaaacccaaggacaccctcatgatctcccggacccctgaggtcacatgcgtggtggtggacgtgagccacgaagaccctgaggtcaagttcaactggtacgtggacggcgtggaggtgcataatgccaagacaaagccgtgtgaggagcagtacggcagcacgtaccgttgtgtcagcgtcctcaccgtcctgcaccaggactggctgaatggcaaggagtacaagtgcaaggtctccaacaaagccctcccagcccccatcgagaaaaccatctccaaagccaaagggcagccccgagaaccacaggtgtacaccctgcccccatcccgggaggagatgaccaagaaccaggtcagcctgacctgcctggtcaaaggcttctatcccagcgacatcgccgtggagtgggagagcaatgggcagccggagaacaactacaagaccacgcctcccgtgctggactccgacggctccttcttcctctatagcaagctcaccgtggacaagagcaggtggcagcaggggaacgtcttctcatgctccgtgatgcatgaggctctgcacaaccactacacgcagaagagcctctccctgtctccgggtggtggcggatcgggaggtggcggatccgaggtacaactggtggaatcaggtggaggtttggtgcagccggggagatcgctcaggcttagctgtgcggcatcggggtttactttcgatgattatgcgatgcattgggtccggaaagcgcctggaaaagggctcgagtgggtttccgccattacgtggaatagcggacacatcgattatgcagacagtgtggagggcagattcacaatctcacgagacaatgctaagaacagcctgtaccttcagatgaactcacttcgcgcggaagataccgccgtatactactgcgccaaagtctcctacttgtctacagcttcgtcgctcgactattggggtcaaggaacgttggtcaccgtctctagtgcctccaccaagggcccatcggtcttccccctggcaccctcctccaagagcacctctgggggcacagcggccctgggctgcctggtcaaggactacttccccgaaccggtgacggtgtcgtggaactcaggcgccctgaccagcggcgtgcacaccttcccggctgtcctacagtcctcaggactctactccctcgagagcgtggtgaccgtgccctccagcagcttgggcacccagacctacatctgcaacgtgaatcacaagcccagcaacaccaaggtggacaagaaagttgagcccaaatcttgt

SEQ ID NO: 328 - protein, 214 aa, synthetic construct
  REGION 1..214: note = source = /note="Description of Artificial Sequence: Synthetic polypeptide"
EIVLTQSPGTLSLSPGERATLSCRASQSVRSSYLAWYQEKPGQAPRLLIYGASSRATGIPDRFSGSGSGTDFTLTISRLEPEDFAVYYCQQYGSSPTFGQGTRLEIKRTVAAPSVFIFPPSDEQLKSGTASVVCLLNNFYPREAKVQWKVDNALQSGNSQESVTEQDSKDSTYSLESTLTLSKADYEKHKVYACEVTHQGLSSPVTKSFNRGEC

SEQ ID NO: 329 - protein, 214 aa, synthetic construct
  REGION 1..214: note = source = /note="Description of Artificial Sequence: Synthetic polypeptide"
DIQMTQSPSSLSASVGDRVTITCRASQGIRNYLAWYQEKPGKAPKLLIYAASTLQSGVPSRFSGSGSGTDFTLTISSLQPEDVATYYCQRYNRAPYTFGQGTKVEIKRTVAAPSVFIFPPSDEQLKSGTASVVCLLNNFYPREAKVQWKVDNALQSGNSQESVTEQDSKDSTYSLKSTLTLSKADYEKHKVYACEVTHQGLSSPVTKSFNRGEC

SEQ ID NO: 330 - protein, 682 aa, synthetic construct
  REGION 1..682: note = source = /note="Description of Artificial Sequence: Synthetic polypeptide"
QVQLQQSGAGLLKPSETLSLTCAVHGGSFSGYYWNWIRKPPGKGLEWIGEINHAGNTNYNPSLKSRVTISLDTSKNQFSLTLTSVTAADTAVYYCARGYCRSTTCYFDYWGQGTLVTVSSASTKGPSVFPLAPSSKSTSGGTAALGCLVKDYFPEPVTVSWNSGALTSGVHTFPAVLQSSGLYSLKSVVTVPSSSLGTQTYICNVNHKPSNTKVDKKVEPKSCDKTHTCPPCPAPELLGGPSVFLFPPKPKDTLMISRTPEVTCVVVDVSHEDPEVKFNWYVDGVEVHNAKTKPCEEQYGSTYRCVSVLTVLHQDWLNGKEYKCKVSNKALPAPIEKTISKAKGQPREPQVYTLPPSREEMTKNQVSLTCLVKGFYPSDIAVEWESNGQPENNYKTTPPVLDSDGSFFLYSKLTVDKSRWQQGNVFSCSVMHEALHNHYTQKSLSLSPGGGGSGGGGSEVQLVESGGGLVQPGRSLRLSCAASGFTFDDYAMHWVRKAPGKGLEWVSAITWNSGHIDYADSVEGRFTISRDNAKNSLYLQMNSLRAEDTAVYYCAKVSYLSTASSLDYWGQGTLVTVSSASTKGPSVFPLAPSSKSTSGGTAALGCLVKDYFPEPVTVSWNSGALTSGVHTFPAVLQSSGLYSLESVVTVPSSSLGTQTYICNVNHKPSNTKVDKKVEPKSC

SEQ ID NO: 331 - DNA, 642 bp, synthetic construct; identical to SEQ ID NO: 325
  misc_feature 1..642: note = source = /note="Description of Artificial Sequence: Synthetic polynucleotide"
  source 1..642: mol_type = other DNA

SEQ ID NO: 332 - DNA, 651 bp, synthetic construct
  misc_feature 1..651: note = source = /note="Description of Artificial Sequence: Synthetic polynucleotide"
  source 1..651: mol_type = other DNA
cagtctgtgctgacgcagccgccctcagtgtctggggccccagggcagagggtcaccatctcctgcactgggagcagttccaacatcggggcaggttatgatgtacactggtaccaggagtttccaggaacagcccccaaactcctcatccaaggtaacagcaatcggccctcaggggtccctgaccgattctctggctccaagtctggcacctcagcctccctggccatcactgggctccaggctgaggatgaggctgattattactgccagtcctatgacagcagcctgagtggttcggtgttcggcggagggaccaagctgaccgtcctaggtcagcccaaggctgccccctcggtcactctgttcccgccctcctctgaggagcttcaagccaacaaggccacactggtgtgtctcataagtgacttctacccgggagccgtgacagtggcctggaaggcagatagcagccccgtcaaggcgggagtggagaccaccacaccctccaaacaaagcaacaacaagtacgcggccaagagctatctgagcctgacgcctgagcagtggaagtcccacagaagctacagctgccaggtcacgcatgaagggagcaccgtggagaagacagtggcccctacagaatgttca

SEQ ID NO: 333 - DNA, 2031 bp, synthetic construct
  misc_feature 1..2031: note = source = /note="Description of Artificial Sequence: Synthetic polynucleotide"
  source 1..2031: mol_type = other DNA
caggtgcagttacagcagtcgggcgcaggactgttgaagccttcggagaccctgtccctcacctgcgctgtccatggtgggtccttcagtggttactactggaactggatccgcaagccaccagggaaggggctagagtggattggggaaatcaatcatgctggaaacaccaactacaacccgtccctcaagagtcgagtcaccatatcattagacacgtccaagaaccagttctccctgacgctgacctctgtgaccgccgcggacacggctgtgtattactgtgcgagaggatattgtagaagtaccacctgctactttgactactggggccagggaaccctagtcaccgtctcctcagcctccaccaagggcccatcggtcttccccctggcaccctcctccaagagcacctctgggggcacagcggccctgggctgcctggtcaaggactacttccccgaaccggtgacggtgtcgtggaactcaggcgccctgaccagcggcgtgcacaccttcccggctgtcctacagtcctcaggactctactccctcaaaagcgtggtgaccgtgccctccagcagcttgggcacccagacctacatctgcaacgtgaatcacaagcccagcaacaccaaggtggacaagaaagttgagcccaaatcttgtgacaaaactcacacatgcccaccgtgcccagcacctgaactcctggggggaccgtcagtcttcctcttccccccaaaacccaaggacaccctcatgatctcccggacccctgaggtcacatgcgtggtggtggacgtgagccacgaagaccctgaggtcaagttcaactggtacgtggacggcgtggaggtgcataatgccaagacaaagccgtgtgaggagcagtacggcagcacgtaccgttgtgtcagcgtcctcaccgtcctgcaccaggactggctgaatggcaaggagtacaagtgcaaggtctccaacaaagccctcccagcccccatcgagaaaaccatctccaaagccaaagggcagccccgagaaccacaggtgtacaccctgcccccatcccgggaggagatgaccaagaaccaggtcagcctgacctgcctggtcaaaggcttctatcccagcgacatcgccgtggagtgggagagcaatgggcagccggagaacaactacaagaccacgcctcccgtgctggactccgacggctccttcttcctctatagcaagctcaccgtggacaagagcaggtggcagcaggggaacgtcttctcatgctccgtgatgcatgaggctctgcacaaccactacacgcagaagagcctctccctgtctccgggtggtggcggatcgggaggtggcggatccgaggtgcagctggtgcagtctggagcagaggtgaaaaagcccggggagtctctgaagatctcctgtaagacttctgaatacagctttaccagctactggatcggctgggtgcgcaagatgcccgggaaaggcctggagtggatggggatcatctatcttggtgactcagataccagatacagcccgtccttccaaggccaggtcaccatctcagccgacaagtccatcagtaccgcctacctgcagtggagcagcctgaaggcctcggacaccgccatgtattactgtgcgagaagtaactggggtcttgactactggggccagggaaccctggtcaccgtctctagtgcctccaccaagggcccatcggtcttccccctggcaccctcctccaagagcacctctgggggcacagcggccctgggctgcctggtcaaggactacttccccgaaccggtgacggtgtcgtggaactcaggcgccctgaccagcggcgtgcacaccttcccggctgtcctacagtcctcaggactctactccctcgagagcgtggtgaccgtgccctccagcagcttgggcacccagacctacatctgcaacgtgaatcacaagcccagcaacaccaaggtggacaagaaagttgagcccaaatcttgt

SEQ ID NO: 334 - protein, 214 aa, synthetic construct; identical to SEQ ID NO: 328
  REGION 1..214: note = source = /note="Description of Artificial Sequence: Synthetic polypeptide"

SEQ ID NO: 335 - protein, 217 aa, synthetic construct
  REGION 1..217: note = source = /note="Description of Artificial Sequence: Synthetic polypeptide"
QSVLTQPPSVSGAPGQRVTISCTGSSSNIGAGYDVHWYQEFPGTAPKLLIQGNSNRPSGVPDRFSGSKSGTSASLAITGLQAEDEADYYCQSYDSSLSGSVFGGGTKLTVLGQPKAAPSVTLFPPSSEELQANKATLVCLISDFYPGAVTVAWKADSSPVKAGVETTTPSKQSNNKYAAKSYLSLTPEQWKSHRSYSCQVTHEGSTVEKTVAPTECS

SEQ ID NO: 336 - protein, 677 aa, synthetic construct
  REGION 1..677: note = source = /note="Description of Artificial Sequence: Synthetic polypeptide"
QVQLQQSGAGLLKPSETLSLTCAVHGGSFSGYYWNWIRKPPGKGLEWIGEINHAGNTNYNPSLKSRVTISLDTSKNQFSLTLTSVTAADTAVYYCARGYCRSTTCYFDYWGQGTLVTVSSASTKGPSVFPLAPSSKSTSGGTAALGCLVKDYFPEPVTVSWNSGALTSGVHTFPAVLQSSGLYSLKSVVTVPSSSLGTQTYICNVNHKPSNTKVDKKVEPKSCDKTHTCPPCPAPELLGGPSVFLFPPKPKDTLMISRTPEVTCVVVDVSHEDPEVKFNWYVDGVEVHNAKTKPCEEQYGSTYRCVSVLTVLHQDWLNGKEYKCKVSNKALPAPIEKTISKAKGQPREPQVYTLPPSREEMTKNQVSLTCLVKGFYPSDIAVEWESNGQPENNYKTTPPVLDSDGSFFLYSKLTVDKSRWQQGNVFSCSVMHEALHNHYTQKSLSLSPGGGGSGGGGSEVQLVQSGAEVKKPGESLKISCKTSEYSFTSYWIGWVRKMPGKGLEWMGIIYLGDSDTRYSPSFQGQVTISADKSISTAYLQWSSLKASDTAMYYCARSNWGLDYWGQGTLVTVSSASTKGPSVFPLAPSSKSTSGGTAALGCLVKDYFPEPVTVSWNSGALTSGVHTFPAVLQSSGLYSLESVVTVPSSSLGTQTYICNVNHKPSNTKVDKKVEPKSC

SEQ ID NO: 337 - DNA, 642 bp, synthetic construct
  misc_feature 1..642: note = source = /note="Description of Artificial Sequence: Synthetic polynucleotide"
  source 1..642: mol_type = other DNA
gacatccagatgacccagtctccatcctccctgtctgcatctgtaggagacagagtcaccatcacttgccgggcaagtcagagcattaacaactatttaaattggtatcaggagagaccagggaaagcccctaagctcctgatctatgctgcatccagtttgcaaagtggggtcccatcaaggttcagtggcagtggatctgggacagatttcactctcaccatcagcagtctgcaacctgaagattttgcaacttactactgtcaacagagttacagtacccctcggacgttcggccaagggaccaagctggaaatcaaacgaacggtggctgcaccatctgtcttcatcttcccgccatctgatgagcagttgaaatctggtaccgcctctgttgtgtgcctgctgaataacttctatcccagagaggccaaagtacagtggaaggtggataacgccctccaatcgggtaactcccaggagagtgtcacagagcaggacagcaaggacagcacctacagcctcgagagcaccctgacgctgagcaaagcagactacgagaaacacaaagtctacgcctgcgaagtcacccatcagggcctgagctcgcccgtcacaaagagcttcaacaggggagagtgt

SEQ ID NO: 338 - DNA, 642 bp, synthetic construct; identical to SEQ ID NO: 326
  misc_feature 1..642: note = source = /note="Description of Artificial Sequence: Synthetic polynucleotide"
  source 1..642: mol_type = other DNA

SEQ ID NO: 339 - DNA, 2040 bp, synthetic construct
  misc_feature 1..2040: note = source = /note="Description of Artificial Sequence: Synthetic polynucleotide"
  source 1..2040: mol_type = other DNA
caggtgcagctgcaggagtcgggcccaggactggtgaagccttcggagaccctgtccctcacctgcactgtctctggtggctccatcagtagttacttctggagctggatccggaagcccccaggtaagggactggagtggattggctatatctattacagtgggcagaccaaatacaacccctccctcaagagtcgagtcaccatatcaatagacacgtccaagaaccagttctccctgaagctgagctctgtgaccgctgcggacacggccgtgtattactgtgcgagagaaactgggagctactacggctttgactactggggccagggaaccctggtcaccgtctcctcagcctccaccaagggcccatcggtcttccccctggcaccctcctccaagagcacctctgggggcacagcggccctgggctgcctggtcaaggactacttccccgaaccggtgacggtgtcgtggaactcaggcgccctgaccagcggcgtgcacaccttcccggctgtcctacagtcctcaggactctactccctcaaaagcgtggtgaccgtgccctccagcagcttgggcacccagacctacatctgcaacgtgaatcacaagcccagcaacaccaaggtggacaagaaagttgagcccaaatcttgtgacaaaactcacacatgcccaccgtgcccagcacctgaactcctggggggaccgtcagtcttcctcttccccccaaaacccaaggacaccctcatgatctcccggacccctgaggtcacatgcgtggtggtggacgtgagccacgaagaccctgaggtcaagttcaactggtacgtggacggcgtggaggtgcataatgccaagacaaagccgtgtgaggagcagtacggcagcacgtaccgttgtgtcagcgtcctcaccgtcctgcaccaggactggctgaatggcaaggagtacaagtgcaaggtctccaacaaagccctcccagcccccatcgagaaaaccatctccaaagccaaagggcagccccgagaaccacaggtgtacaccctgcccccatcccgggaggagatgaccaagaaccaggtcagcctgacctgcctggtcaaaggcttctatcccagcgacatcgccgtggagtgggagagcaatgggcagccggagaacaactacaagaccacgcctcccgtgctggactccgacggctccttcttcctctatagcaagctcaccgtggacaagagcaggtggcagcaggggaacgtcttctcatgctccgtgatgcatgaggctctgcacaaccactacacgcagaagagcctctccctgtctccgggtggtggcggatcgggaggtggcggatccgaggtacaactggtggaatcaggtggaggtttggtgcagccggggagatcgctcaggcttagctgtgcggcatcggggtttactttcgatgattatgcgatgcattgggtccggaaagcgcctggaaaagggctcgagtgggtttccgccattacgtggaatagcggacacatcgattatgcagacagtgtggagggcagattcacaatctcacgagacaatgctaagaacagcctgtaccttcagatgaactcacttcgcgcggaagataccgccgtatactactgcgccaaagtctcctacttgtctacagcttcgtcgctcgactattggggtcaaggaacgttggtcaccgtctctagtgcctccaccaagggcccatcggtcttccccctggcaccctcctccaagagcacctctgggggcacagcggccctgggctgcctggtcaaggactacttccccgaaccggtgacggtgtcgtggaactcaggcgccctgaccagcggcgtgcacaccttcccggctgtcctacagtcctcaggactctactccctcgagagcgtggtgaccgtgccctccagcagcttgggcacccagacctacatctgcaacgtgaatcacaagcccagcaacaccaaggtggacaagaaagttgagcccaaatcttgt

SEQ ID NO: 340 - protein, 214 aa, synthetic construct
  REGION 1..214: note = source = /note="Description of Artificial Sequence: Synthetic polypeptide"
DIQMTQSPSSLSASVGDRVTITCRASQSINNYLNWYQERPGKAPKLLIYAASSLQSGVPSRFSGSGSGTDFTLTISSLQPEDFATYYCQQSYSTPRTFGQGTKLEIKRTVAAPSVFIFPPSDEQLKSGTASVVCLLNNFYPREAKVQWKVDNALQSGNSQESVTEQDSKDSTYSLESTLTLSKADYEKHKVYACEVTHQGLSSPVTKSFNRGEC

SEQ ID NO: 341 - protein, 214 aa, synthetic construct; identical to SEQ ID NO: 329
  REGION 1..214: note = source = /note="Description of Artificial Sequence: Synthetic polypeptide"

SEQ ID NO: 342 - protein, 680 aa, synthetic construct
  REGION 1..680: note = source = /note="Description of Artificial Sequence: Synthetic polypeptide"
QVQLQESGPGLVKPSETLSLTCTVSGGSISSYFWSWIRKPPGKGLEWIGYIYYSGQTKYNPSLKSRVTISIDTSKNQFSLKLSSVTAADTAVYYCARETGSYYGFDYWGQGTLVTVSSASTKGPSVFPLAPSSKSTSGGTAALGCLVKDYFPEPVTVSWNSGALTSGVHTFPAVLQSSGLYSLKSVVTVPSSSLGTQTYICNVNHKPSNTKVDKKVEPKSCDKTHTCPPCPAPELLGGPSVFLFPPKPKDTLMISRTPEVTCVVVDVSHEDPEVKFNWYVDGVEVHNAKTKPCEEQYGSTYRCVSVLTVLHQDWLNGKEYKCKVSNKALPAPIEKTISKAKGQPREPQVYTLPPSREEMTKNQVSLTCLVKGFYPSDIAVEWESNGQPENNYKTTPPVLDSDGSFFLYSKLTVDKSRWQQGNVFSCSVMHEALHNHYTQKSLSLSPGGGGSGGGGSEVQLVESGGGLVQPGRSLRLSCAASGFTFDDYAMHWVRKAPGKGLEWVSAITWNSGHIDYADSVEGRFTISRDNAKNSLYLQMNSLRAEDTAVYYCAKVSYLSTASSLDYWGQGTLVTVSSASTKGPSVFPLAPSSKSTSGGTAALGCLVKDYFPEPVTVSWNSGALTSGVHTFPAVLQSSGLYSLESVVTVPSSSLGTQTYICNVNHKPSNTKVDKKVEPKSC

SEQ ID NO: 343 - DNA, 642 bp, synthetic construct; identical to SEQ ID NO: 337
  misc_feature 1..642: note = source = /note="Description of Artificial Sequence: Synthetic polynucleotide"
  source 1..642: mol_type = other DNA

SEQ ID NO: 344 - DNA, 651 bp, synthetic construct; identical to SEQ ID NO: 332
  misc_feature 1..651: note = source = /note="Description of Artificial Sequence: Synthetic polynucleotide"
  source 1..651: mol_type = other DNA

SEQ ID NO: 345 - DNA, 2025 bp, synthetic construct
  misc_feature 1..2025: note = source = /note="Description of Artificial Sequence: Synthetic polynucleotide"
  source 1..2025: mol_type = other DNA
caggtgcagctgcaggagtcgggcccaggactggtgaagccttcggagaccctgtccctcacctgcactgtctctggtggctccatcagtagttacttctggagctggatccggaagcccccaggtaagggactggagtggattggctatatctattacagtgggcagaccaaatacaacccctccctcaagagtcgagtcaccatatcaatagacacgtccaagaaccagttctccctgaagctgagctctgtgaccgctgcggacacggccgtgtattactgtgcgagagaaactgggagctactacggctttgactactggggccagggaaccctggtcaccgtctcctcagcctccaccaagggcccatcggtcttccccctggcaccctcctccaagagcacctctgggggcacagcggccctgggctgcctggtcaaggactacttccccgaaccggtgacggtgtcgtggaactcaggcgccctgaccagcggcgtgcacaccttcccggctgtcctacagtcctcaggactctactccctcaaaagcgtggtgaccgtgccctccagcagcttgggcacccagacctacatctgcaacgtgaatcacaagcccagcaacaccaaggtggacaagaaagttgagcccaaatcttgtgacaaaactcacacatgcccaccgtgcccagcacctgaactcctggggggaccgtcagtcttcctcttccccccaaaacccaaggacaccctcatgatctcccggacccctgaggtcacatgcgtggtggtggacgtgagccacgaagaccctgaggtcaagttcaactggtacgtggacggcgtggaggtgcataatgccaagacaaagccgtgtgaggagcagtacggcagcacgtaccgttgtgtcagcgtcctcaccgtcctgcaccaggactggctgaatggcaaggagtacaagtgcaaggtctccaacaaagccctcccagcccccatcgagaaaaccatctccaaagccaaagggcagccccgagaaccacaggtgtacaccctgcccccatcccgggaggagatgaccaagaaccaggtcagcctgacctgcctggtcaaaggcttctatcccagcgacatcgccgtggagtgggagagcaatgggcagccggagaacaactacaagaccacgcctcccgtgctggactccgacggctccttcttcctctatagcaagctcaccgtggacaagagcaggtggcagcaggggaacgtcttctcatgctccgtgatgcatgaggctctgcacaaccactacacgcagaagagcctctccctgtctccgggtggtggcggatcgggaggtggcggatccgaggtgcagctggtgcagtctggagcagaggtgaaaaagcccggggagtctctgaagatctcctgtaagacttctgaatacagctttaccagctactggatcggctgggtgcgcaagatgcccgggaaaggcctggagtggatggggatcatctatcttggtgactcagataccagatacagcccgtccttccaaggccaggtcaccatctcagccgacaagtccatcagtaccgcctacctgcagtggagcagcctgaaggcctcggacaccgccatgtattactgtgcgagaagtaactggggtcttgactactggggccagggaaccctggtcaccgtctctagtgcctccaccaagggcccatcggtcttccccctggcaccctcctccaagagcacctctgggggcacagcggccctgggctgcctggtcaaggactacttccccgaaccggtgacggtgtcgtggaactcaggcgccctgaccagcggcgtgcacaccttcccggctgtcctacagtcctcaggactctactccctcgagagcgtggtgaccgtgccctccagcagcttgggcacccagacctacatctgcaacgtgaatcacaagcccagcaacaccaaggtggacaagaaagttgagcccaaatcttgt

SEQ ID NO: 346 - protein, 214 aa, synthetic construct; identical to SEQ ID NO: 340
  REGION 1..214: note = source = /note="Description of Artificial Sequence: Synthetic polypeptide"

SEQ ID NO: 347 - protein, 217 aa, synthetic construct; identical to SEQ ID NO: 335
  REGION 1..217: note = source = /note="Description of Artificial Sequence: Synthetic polypeptide"

SEQ ID NO: 348 - protein, 675 aa, synthetic construct
  REGION 1..675: note = source = /note="Description of Artificial Sequence: Synthetic polypeptide"
QVQLQESGPGLVKPSETLSLTCTVSGGSISSYFWSWIRKPPGKGLEWIGYIYYSGQTKYNPSLKSRVTISIDTSKNQFSLKLSSVTAADTAVYYCARETGSYYGFDYWGQGTLVTVSSASTKGPSVFPLAPSSKSTSGGTAALGCLVKDYFPEPVTVSWNSGALTSGVHTFPAVLQSSGLYSLKSVVTVPSSSLGTQTYICNVNHKPSNTKVDKKVEPKSCDKTHTCPPCPAPELLGGPSVFLFPPKPKDTLMISRTPEVTCVVVDVSHEDPEVKFNWYVDGVEVHNAKTKPCEEQYGSTYRCVSVLTVLHQDWLNGKEYKCKVSNKALPAPIEKTISKAKGQPREPQVYTLPPSREEMTKNQVSLTCLVKGFYPSDIAVEWESNGQPENNYKTTPPVLDSDGSFFLYSKLTVDKSRWQQGNVFSCSVMHEALHNHYTQKSLSLSPGGGGSGGGGSEVQLVQSGAEVKKPGESLKISCKTSEYSFTSYWIGWVRKMPGKGLEWMGIIYLGDSDTRYSPSFQGQVTISADKSISTAYLQWSSLKASDTAMYYCARSNWGLDYWGQGTLVTVSSASTKGPSVFPLAPSSKSTSGGTAALGCLVKDYFPEPVTVSWNSGALTSGVHTFPAVLQSSGLYSLESVVTVPSSSLGTQTYICNVNHKPSNTKVDKKVEPKSC

SEQ ID NO: 349 - DNA, 660 bp, synthetic construct
  misc_feature 1..660: note = source = /note="Description of Artificial Sequence: Synthetic polynucleotide"
  source 1..660: mol_type = other DNA
gacatccagatgacccagtctccaagctccctgtctgcgtctgtgggcgatagggtcaccatcacttgcaggtccagccagagtgtgttatacagctccaacaataagaactacttagtttggtaccaggagaaaccaggaaaggttcctaaactgctcatttactgggcatctacccgggaatccggggtccctagtcgattcagtggcagcgggtctgggacagatttcactctcaccatcagcagcctgcagcctgaagatgtggcaacttattactgtcagcaatattataagactcctctcactttcggcggagggaccaaggtggagatcaaacgaacggtggctgcaccatctgtcttcatcttcccgccatctgatgagcagttgaaatctggtaccgcctctgttgtgtgcctgctgaataacttctatcccagagaggccaaagtacagtggaaggtggataacgccctccaatcgggtaactcccaggagagtgtcacagagcaggacagcaaggacagcacctacagcctcgagagcaccctgacgctgagcaaagcagactacgagaaacacaaagtctacgcctgcgaagtcacccatcagggcctgagctcgcccgtcacaaagagcttcaacaggggagagtgt

SEQ ID NO: 350 - DNA, 642 bp, synthetic construct; identical to SEQ ID NO: 326
  misc_feature 1..642: note = source = /note="Description of Artificial Sequence: Synthetic polynucleotide"
  source 1..642: mol_type = other DNA

SEQ ID NO: 351 - DNA, 2061 bp, synthetic construct
  misc_feature 1..2061: note = source = /note="Description of Artificial Sequence: Synthetic polynucleotide"
  source 1..2061: mol_type = other DNA
caggtacagttgcaggagtcaggtccaggactggtgaagccctcggagaccctctcactcacctgtaccatctccggggacagtgtctctaccaacagtgttgcttggaactggatcaggaagcccccagggaaaggccttgagtggataggaaggacatactacaggtccaagtggtataatgattatgcagtttctctgaaaagtcgagtaaccatcagcccagacacatccaagaaccagttctccctgaagctgagctctgtgactgccgcggacacggctgtgtattactgtgcaagagaggatggggatagctactaccgctacggtatggacgtctggggccaagggaccacggtcaccgtctcctcagcctccaccaagggcccatcggtcttccccctggcaccctcctccaagagcacctctgggggcacagcggccctgggctgcctggtcaaggactacttccccgaaccggtgacggtgtcgtggaactcaggcgccctgaccagcggcgtgcacaccttcccggctgtcctacagtcctcaggactctactccctcaaaagcgtggtgaccgtgccctccagcagcttgggcacccagacctacatctgcaacgtgaatcacaagcccagcaacaccaaggtggacaagaaagttgagcccaaatcttgtgacaaaactcacacatgcccaccgtgcccagcacctgaactcctggggggaccgtcagtcttcctcttccccccaaaacccaaggacaccctcatgatctcccggacccctgaggtcacatgcgtggtggtggacgtgagccacgaagaccctgaggtcaagttcaactggtacgtggacggcgtggaggtgcataatgccaagacaaagccgtgtgaggagcagtacggcagcacgtaccgttgtgtcagcgtcctcaccgtcctgcaccaggactggctgaatggcaaggagtacaagtgcaaggtctccaacaaagccctcccagcccccatcgagaaaaccatctccaaagccaaagggcagccccgagaaccacaggtgtacaccctgcccccatcccgggaggagatgaccaagaaccaggtcagcctgacctgcctggtcaaaggcttctatcccagcgacatcgccgtggagtgggagagcaatgggcagccggagaacaactacaagaccacgcctcccgtgctggactccgacggctccttcttcctctatagcaagctcaccgtggacaagagcaggtggcagcaggggaacgtcttctcatgctccgtgatgcatgaggctctgcacaaccactacacgcagaagagcctctccctgtctccgggtggtggcggatcgggaggtggcggatccgaggtacaactggtggaatcaggtggaggtttggtgcagccggggagatcgctcaggcttagctgtgcggcatcggggtttactttcgatgattatgcgatgcattgggtccggaaagcgcctggaaaagggctcgagtgggtttccgccattacgtggaatagcggacacatcgattatgcagacagtgtggagggcagattcacaatctcacgagacaatgctaagaacagcctgtaccttcagatgaactcacttcgcgcggaagataccgccgtatactactgcgccaaagtctcctacttgtctacagcttcgtcgctcgactattggggtcaaggaacgttggtcaccgtctctagtgcctccaccaagggcccatcggtcttccccctggcaccctcctccaagagcacctctgggggcacagcggccctgggctgcctggtcaaggactacttccccgaaccggtgacggtgtcgtggaactcaggcgccctgaccagcggcgtgcacaccttcccggctgtcctacagtcctcaggactctactccctcgagagcgtggtgaccgtgccctccagcagcttgggcacccagacctacatctgcaacgtgaatcacaagcccagcaacaccaaggtggacaagaaagttgagcccaaatcttgt

SEQ ID NO: 352 - protein, 220 aa, synthetic construct
  REGION 1..220: note = source = /note="Description of Artificial Sequence: Synthetic polypeptide"
DIQMTQSPSSLSASVGDRVTITCRSSQSVLYSSNNKNYLVWYQEKPGKVPKLLIYWASTRESGVPSRFSGSGSGTDFTLTISSLQPEDVATYYCQQYYKTPLTFGGGTKVEIKRTVAAPSVFIFPPSDEQLKSGTASVVCLLNNFYPREAKVQWKVDNALQSGNSQESVTEQDSKDSTYSLESTLTLSKADYEKHKVYACEVTHQGLSSPVTKSFNRGEC

SEQ ID NO: 353 - protein, 214 aa, synthetic construct; identical to SEQ ID NO: 329
  REGION 1..214: note = source = /note="Description of Artificial Sequence: Synthetic polypeptide"

SEQ ID NO: 354 - protein, 687 aa, synthetic construct
  REGION 1..687: note = source = /note="Description of Artificial Sequence: Synthetic polypeptide"
QVQLQESGPGLVKPSETLSLTCTISGDSVSTNSVAWNWIRKPPGKGLEWIGRTYYRSKWYNDYAVSLKSRVTISPDTSKNQFSLKLSSVTAADTAVYYCAREDGDSYYRYGMDVWGQGTTVTVSSASTKGPSVFPLAPSSKSTSGGTAALGCLVKDYFPEPVTVSWNSGALTSGVHTFPAVLQSSGLYSLKSVVTVPSSSLGTQTYICNVNHKPSNTKVDKKVEPKSCDKTHTCPPCPAPELLGGPSVFLFPPKPKDTLMISRTPEVTCVVVDVSHEDPEVKFNWYVDGVEVHNAKTKPCEEQYGSTYRCVSVLTVLHQDWLNGKEYKCKVSNKALPAPIEKTISKAKGQPREPQVYTLPPSREEMTKNQVSLTCLVKGFYPSDIAVEWESNGQPENNYKTTPPVLDSDGSFFLYSKLTVDKSRWQQGNVFSCSVMHEALHNHYTQKSLSLSPGGGGSGGGGSEVQLVESGGGLVQPGRSLRLSCAASGFTFDDYAMHWVRKAPGKGLEWVSAITWNSGHIDYADSVEGRFTISRDNAKNSLYLQMNSLRAEDTAVYYCAKVSYLSTASSLDYWGQGTLVTVSSASTKGPSVFPLAPSSKSTSGGTAALGCLVKDYFPEPVTVSWNSGALTSGVHTFPAVLQSSGLYSLESVVTVPSSSLGTQTYICNVNHKPSNTKVDKKVEPKSC

SEQ ID NO: 355 - DNA, 660 bp, synthetic construct; identical to SEQ ID NO: 349
  misc_feature 1..660: note = source = /note="Description of Artificial Sequence: Synthetic polynucleotide"
  source 1..660: mol_type = other DNA

SEQ ID NO: 356 - DNA, 651 bp, synthetic construct; identical to SEQ ID NO: 332
  misc_feature 1..651: note = source = /note="Description of Artificial Sequence: Synthetic polynucleotide"
  source 1..651: mol_type = other DNA

SEQ ID NO: 357 - DNA, 2046 bp, synthetic construct
  misc_feature 1..2046: note = source = /note="Description of Artificial Sequence: Synthetic polynucleotide"
  source 1..2046: mol_type = other DNA
caggtacagttgcaggagtcaggtccaggactggtgaagccctcggagaccctctcactcacctgtaccatctccggggacagtgtctctaccaacagtgttgcttggaactggatcaggaagcccccagggaaaggccttgagtggataggaaggacatactacaggtccaagtggtataatgattatgcagtttctctgaaaagtcgagtaaccatcagcccagacacatccaagaaccagttctccctgaagctgagctctgtgactgccgcggacacggctgtgtattactgtgcaagagaggatggggatagctactaccgctacggtatggacgtctggggccaagggaccacggtcaccgtctcctcagcctccaccaagggcccatcggtcttccccctggcaccctcctccaagagcacctctgggggcacagcggccctgggctgcctggtcaaggactacttccccgaaccggtgacggtgtcgtggaactcaggcgccctgaccagcggcgtgcacaccttcccggctgtcctacagtcctcaggactctactccctcaaaagcgtggtgaccgtgccctccagcagcttgggcacccagacctacatctgcaacgtgaatcacaagcccagcaacaccaaggtggacaagaaagttgagcccaaatcttgtgacaaaactcacacatgcccaccgtgcccagcacctgaactcctggggggaccgtcagtcttcctcttccccccaaaacccaaggacaccctcatgatctcccggacccctgaggtcacatgcgtggtggtggacgtgagccacgaagaccctgaggtcaagttcaactggtacgtggacggcgtggaggtgcataatgccaagacaaagccgtgtgaggagcagtacggcagcacgtaccgttgtgtcagcgtcctcaccgtcctgcaccaggactggctgaatggcaaggagtacaagtgcaaggtctccaacaaagccctcccagcccccatcgagaaaaccatctccaaagccaaagggcagccccgagaaccacaggtgtacaccctgcccccatcccgggaggagatgaccaagaaccaggtcagcctgacctgcctggtcaaaggcttctatcccagcgacatcgccgtggagtgggagagcaatgggcagccggagaacaactacaagaccacgcctcccgtgctggactccgacggctccttcttcctctatagcaagctcaccgtggacaagagcaggtggcagcaggggaacgtcttctcatgctccgtgatgcatgaggctctgcacaaccactacacgcagaagagcctctccctgtctccgggtggtggcggatcgggaggtggcggatccgaggtgcagctggtgcagtctggagcagaggtgaaaaagcccggggagtctctgaagatctcctgtaagacttctgaatacagctttaccagctactggatcggctgggtgcgcaagatgcccgggaaaggcctggagtggatggggatcatctatcttggtgactcagataccagatacagcccgtccttccaaggccaggtcaccatctcagccgacaagtccatcagtaccgcctacctgcagtggagcagcctgaaggcctcggacaccgccatgtattactgtgcgagaagtaactggggtcttgactactggggccagggaaccctggtcaccgtctctagtgcctccaccaagggcccatcggtcttccccctggcaccctcctccaagagcacctctgggggcacagcggccctgggctgcctggtcaaggactacttccccgaaccggtgacggtgtcgtggaactcaggcgccctgaccagcggcgtgcacaccttcccggctgtcctacagtcctcaggactctactccctcgagagcgtggtgaccgtgccctccagcagcttgggcacccagacctacatctgcaacgtgaatcacaagcccagcaacaccaaggtggacaagaaagttgagcccaaatcttgt

SEQ ID NO: 358 - protein, 220 aa, synthetic construct; identical to SEQ ID NO: 352
  REGION 1..220: note = source = /note="Description of Artificial Sequence: Synthetic polypeptide"

SEQ ID NO: 359 - protein, 217 aa, synthetic construct; identical to SEQ ID NO: 335
  REGION 1..217: note = source = /note="Description of Artificial Sequence: Synthetic polypeptide"

SEQ ID NO: 360 - protein, 682 aa, synthetic construct
  REGION 1..682: note = source = /note="Description of Artificial Sequence: Synthetic polypeptide"
QVQLQESGPGLVKPSETLSLTCTISGDSVSTNSVAWNWIRKPPGKGLEWIGRTYYRSKWYNDYAVSLKSRVTISPDTSKNQFSLKLSSVTAADTAVYYCAREDGDSYYRYGMDVWGQGTTVTVSSASTKGPSVFPLAPSSKSTSGGTAALGCLVKDYFPEPVTVSWNSGALTSGVHTFPAVLQSSGLYSLKSVVTVPSSSLGTQTYICNVNHKPSNTKVDKKVEPKSCDKTHTCPPCPAPELLGGPSVFLFPPKPKDTLMISRTPEVTCVVVDVSHEDPEVKFNWYVDGVEVHNAKTKPCEEQYGSTYRCVSVLTVLHQDWLNGKEYKCKVSNKALPAPIEKTISKAKGQPREPQVYTLPPSREEMTKNQVSLTCLVKGFYPSDIAVEWESNGQPENNYKTTPPVLDSDGSFFLYSKLTVDKSRWQQGNVFSCSVMHEALHNHYTQKSLSLSPGGGGSGGGGSEVQLVQSGAEVKKPGESLKISCKTSEYSFTSYWIGWVRKMPGKGLEWMGIIYLGDSDTRYSPSFQGQVTISADKSISTAYLQWSSLKASDTAMYYCARSNWGLDYWGQGTLVTVSSASTKGPSVFPLAPSSKSTSGGTAALGCLVKDYFPEPVTVSWNSGALTSGVHTFPAVLQSSGLYSLESVVTVPSSSLGTQTYICNVNHKPSNTKVDKKVEPKSC

SEQ ID NO: 361 - DNA, 642 bp, synthetic construct; identical to SEQ ID NO: 290
  misc_feature 1..642: note = source = /note="Description of Artificial Sequence: Synthetic polynucleotide"
  source 1..642: mol_type = other DNA

SEQ ID NO: 362 - DNA, 2055 bp, synthetic construct
  misc_feature 1..2055: note = source = /note="Description of Artificial Sequence: Synthetic polynucleotide"
  source 1..2055: mol_type = other DNA
gaggtacaactggtggaatcaggtggaggtttggtgcagccggggagatcgctcaggcttagctgtgcggcatcggggtttactttcgatgattatgcgatgcattgggtccggaaagcgcctggaaaagggctcgagtgggtttccgccattacgtggaatagcggacacatcgattatgcagacagtgtggagggcagattcacaatctcacgagacaatgctaagaacagcctgtaccttcagatgaactcacttcgcgcggaagataccgccgtatactactgcgccaaagtctcctacttgtctacagcttcgtcgctcgactattggggtcaaggaacgttggtcaccgtctctagtacggtggctgcaccatctgtcttcatcttcccgccatctgatgagcagttgaaatctggaactgcctctgttgtgtgcctgctgaataacttctatcccagagaggccaaagtacagtggaaggtggataacgccctccaatcgggtaactcccaggagagtgtcacagagcaggacagcaaggacagcacctacagcctcaagagcaccctgacgctgagcaaagcagactacgagaaacacaaagtctacgcctgcgaagtcacccatcagggcctgagctcgcccgtcacaaagagcttcaacaggggagagtgtgacaaaactcacacatgcccaccgtgcccagcacctgaactcctggggggaccgtcagtcttcctcttccccccaaaacccaaggacaccctcatgatctcccggacccctgaggtcacatgcgtggtggtggacgtgagccacgaagaccctgaggtcaagttcaactggtacgtggacggcgtggaggtgcataatgccaagacaaagccgtgtgaggagcagtacggcagcacgtaccgttgtgtcagcgtcctcaccgtcctgcaccaggactggctgaatggcaaggagtacaagtgcaaggtctccaacaaagccctcccagcccccatcgagaaaaccatctccaaagccaaagggcagccccgagaaccacaggtgtacaccctgcccccatcccgggaggagatgaccaagaaccaggtcagcctgacctgcctggtcaaaggcttctatcccagcgacatcgccgtggagtgggagagcaatgggcagccggagaacaactacaagaccacgcctcccgtgctggactccgacggctccttcttcctctatagcaagctcaccgtggacaagagcaggtggcagcaggggaacgtcttctcatgctccgtgatgcatgaggctctgcacaaccactacacgcagaagagcctctccctgtctccgggtggtggcggatcgggaggtggcggatcccaggtgcagttacagcagtcgggcgcaggactgttgaagccttcggagaccctgtccctcacctgcgctgtccatggtgggtccttcagtggttactactggaactggattcgcaagccaccagggaaggggctagagtggattggggaaatcaatcatgctggaaacaccaactacaacccgtccctcaagagtcgagtcaccatatcattagacacgtccaagaaccagttctccctgacgctgacctctgtgaccgccgcggacacggctgtgtattactgtgcgagaggatattgtagaagtaccacctgctactttgactactggggccagggaaccctagtcaccgtctcctcagcctccaccaagggcccatcggtcttccccctggcaccctcctccaagagcacctctgggggcacagcggccctgggctgcctggtcaaggactacttccccgaaccggtgacggtgtcgtggaactcaggcgccctgaccagcggcgtgcacaccttcccggctgtcctacagtcctcaggactctactccctcgagagcgtggtgaccgtgccctccagcagcttgggcacccagacctacatctgcaacgtgaatcacaagcccagcaacaccaaggtggacaagaaagttgagcccaaatcttgt

SEQ ID NO: 363 - DNA, 633 bp, synthetic construct
  misc_feature 1..633: note = source = /note="Description of Artificial Sequence: Synthetic polynucleotide"
  source 1..633: mol_type = other DNA
gatatccaaatgacacaatcaccatcgtcgctttcagcgtctgttggcgaccgtgtgacgattacctgtcgcgcgtcccagggaatccggaattacctcgcatggtatcaggaaaaacccggaaaagcaccgaagctcctgatctatgccgcctcgactcttcagagtggtgtgccgtcgaggtttagcgggtccgggtcaggtacggactttactctcacaatttccagcctgcagcccgaagatgtagctacctattactgccagagatacaaccgagcgccttacacattcggacaagggacaaaagtcgagatcaagcgtgcctccaccaagggcccatcggtcttccccctggcaccctcctccaagagcacctctgggggcacagcggccctgggctgcctggtcaaggactacttccccgaaccggtgacggtgtcgtggaactcaggcgccctgaccagcggcgtgcacaccttcccggctgtcctacagtcctcaggactctactccctcgaaagcgtggtgaccgtgccctccagcagcttgggcacccagacctacatctgcaacgtgaatcacaagcccagcaacaccaaggtggacaagaaagttgagcccaaatcttgt

SEQ ID NO: 364 - protein, 214 aa, synthetic construct; identical to SEQ ID NO: 293
  REGION 1..214: note = source = /note="Description of Artificial Sequence: Synthetic polypeptide"

SEQ ID NO: 365 - protein, 685 aa, synthetic construct
  REGION 1..685: note = source = /note="Description of Artificial Sequence: Synthetic polypeptide"
EVQLVESGGGLVQPGRSLRLSCAASGFTFDDYAMHWVRKAPGKGLEWVSAITWNSGHIDYADSVEGRFTISRDNAKNSLYLQMNSLRAEDTAVYYCAKVSYLSTASSLDYWGQGTLVTVSSTVAAPSVFIFPPSDEQLKSGTASVVCLLNNFYPREAKVQWKVDNALQSGNSQESVTEQDSKDSTYSLKSTLTLSKADYEKHKVYACEVTHQGLSSPVTKSFNRGECDKTHTCPPCPAPELLGGPSVFLFPPKPKDTLMISRTPEVTCVVVDVSHEDPEVKFNWYVDGVEVHNAKTKPCEEQYGSTYRCVSVLTVLHQDWLNGKEYKCKVSNKALPAPIEKTISKAKGQPREPQVYTLPPSREEMTKNQVSLTCLVKGFYPSDIAVEWESNGQPENNYKTTPPVLDSDGSFFLYSKLTVDKSRWQQGNVFSCSVMHEALHNHYTQKSLSLSPGGGGSGGGGSQVQLQQSGAGLLKPSETLSLTCAVHGGSFSGYYWNWIRKPPGKGLEWIGEINHAGNTNYNPSLKSRVTISLDTSKNQFSLTLTSVTAADTAVYYCARGYCRSTTCYFDYWGQGTLVTVSSASTKGPSVFPLAPSSKSTSGGTAALGCLVKDYFPEPVTVSWNSGALTSGVHTFPAVLQSSGLYSLESVVTVPSSSLGTQTYICNVNHKPSNTKVDKKVEPKSC

SEQ ID NO: 366 - protein, 211 aa, synthetic construct
  REGION 1..211: note = source = /note="Description of Artificial Sequence: Synthetic polypeptide"
DIQMTQSPSSLSASVGDRVTITCRASQGIRNYLAWYQEKPGKAPKLLIYAASTLQSGVPSRFSGSGSGTDFTLTISSLQPEDVATYYCQRYNRAPYTFGQGTKVEIKRASTKGPSVFPLAPSSKSTSGGTAALGCLVKDYFPEPVTVSWNSGALTSGVHTFPAVLQSSGLYSLESVVTVPSSSLGTQTYICNVNHKPSNTKVDKKVEPKSC

SEQ ID NO: 367 - DNA, 642 bp, synthetic construct; identical to SEQ ID NO: 296
  misc_feature 1..642: note = source = /note="Description of Artificial Sequence: Synthetic polynucleotide"
  source 1..642: mol_type = other DNA

SEQ ID NO: 368 - DNA, 2049 bp, synthetic construct
  misc_feature 1..2049: note = source = /note="Description of Artificial Sequence: Synthetic polynucleotide"
  source 1..2049: mol_type = other DNA
gaggtacaactggtggaatcaggtggaggtttggtgcagccggggagatcgctcaggcttagctgtgcggcatcggggtttactttcgatgattatgcgatgcattgggtccggaaagcgcctggaaaagggctcgagtgggtttccgccattacgtggaatagcggacacatcgattatgcagacagtgtggagggcagattcacaatctcacgagacaatgctaagaacagcctgtaccttcagatgaactcacttcgcgcggaagataccgccgtatactactgcgccaaagtctcctacttgtctacagcttcgtcgctcgactattggggtcaaggaacgttggtcaccgtctctagtacggtggctgcaccatctgtcttcatcttcccgccatctgatgagcagttgaaatctggaactgcctctgttgtgtgcctgctgaataacttctatcccagagaggccaaagtacagtggaaggtggataacgccctccaatcgggtaactcccaggagagtgtcacagagcaggacagcaaggacagcacctacagcctcaagagcaccctgacgctgagcaaagcagactacgagaaacacaaagtctacgcctgcgaagtcacccatcagggcctgagctcgcccgtcacaaagagcttcaacaggggagagtgtgacaaaactcacacatgcccaccgtgcccagcacctgaactcctggggggaccgtcagtcttcctcttccccccaaaacccaaggacaccctcatgatctcccggacccctgaggtcacatgcgtggtggtggacgtgagccacgaagaccctgaggtcaagttcaactggtacgtggacggcgtggaggtgcataatgccaagacaaagccgtgtgaggagcagtacggcagcacgtaccgttgtgtcagcgtcctcaccgtcctgcaccaggactggctgaatggcaaggagtacaagtgcaaggtctccaacaaagccctcccagcccccatcgagaaaaccatctccaaagccaaagggcagccccgagaaccacaggtgtacaccctgcccccatcccgggaggagatgaccaagaaccaggtcagcctgacctgcctggtcaaaggcttctatcccagcgacatcgccgtggagtgggagagcaatgggcagccggagaacaactacaagaccacgcctcccgtgctggactccgacggctccttcttcctctatagcaagctcaccgtggacaagagcaggtggcagcaggggaacgtcttctcatgctccgtgatgcatgaggctctgcacaaccactacacgcagaagagcctctccctgtctccgggtggtggcggatcgggaggtggcggatcccaggtgcagctgcaggagtcgggcccaggactggtgaagccttcggagaccctgtccctcacctgcactgtctctggtggctccatcagtagttacttctggagctggattcggaagcccccaggtaagggactggagtggattggctatatctattacagtgggcagaccaaatacaacccctccctcaagagtcgagtcaccatatcaatagacacgtccaagaaccagttctccctgaagctgagctctgtgaccgctgcggacacggccgtgtattactgtgcgagagaaactgggagctactacggctttgactactggggccagggaaccctggtcaccgtctcctcagcctccaccaagggcccatcggtcttccccctggcaccctcctccaagagcacctctgggggcacagcggccctgggctgcctggtcaaggactacttccccgaaccggtgacggtgtcgtggaactcaggcgccctgaccagcggcgtgcacaccttcccggctgtcctacagtcctcaggactctactccctcgagagcgtggtgaccgtgccctccagcagcttgggcacccagacctacatctgcaacgtgaatcacaagcccagcaacaccaaggtggacaagaaagttgagcccaaatcttgt

SEQ ID NO: 369 - DNA, 633 bp, synthetic construct; identical to SEQ ID NO: 363
  misc_feature 1..633: note = source = /note="Description of Artificial Sequence: Synthetic polynucleotide"
  source 1..633: mol_type = other DNA

SEQ ID NO: 370 - protein, 214 aa, synthetic construct; identical to SEQ ID NO: 299
  REGION 1..214: note = source = /note="Description of Artificial Sequence: Synthetic polypeptide"

SEQ ID NO: 371 - protein, 683 aa, synthetic construct
  REGION 1..683: note = source = /note="Description of Artificial Sequence: Synthetic polypeptide"
EVQLVESGGGLVQPGRSLRLSCAASGFTFDDYAMHWVRKAPGKGLEWVSAITWNSGHIDYADSVEGRFTISRDNAKNSLYLQMNSLRAEDTAVYYCAKVSYLSTASSLDYWGQGTLVTVSSTVAAPSVFIFPPSDEQLKSGTASVVCLLNNFYPREAKVQWKVDNALQSGNSQESVTEQDSKDSTYSLKSTLTLSKADYEKHKVYACEVTHQGLSSPVTKSFNRGECDKTHTCPPCPAPELLGGPSVFLFPPKPKDTLMISRTPEVTCVVVDVSHEDPEVKFNWYVDGVEVHNAKTKPCEEQYGSTYRCVSVLTVLHQDWLNGKEYKCKVSNKALPAPIEKTISKAKGQPREPQVYTLPPSREEMTKNQVSLTCLVKGFYPSDIAVEWESNGQPENNYKTTPPVLDSDGSFFLYSKLTVDKSRWQQGNVFSCSVMHEALHNHYTQKSLSLSPGGGGSGGGGSQVQLQESGPGLVKPSETLSLTCTVSGGSISSYFWSWIRKPPGKGLEWIGYIYYSGQTKYNPSLKSRVTISIDTSKNQFSLKLSSVTAADTAVYYCARETGSYYGFDYWGQGTLVTVSSASTKGPSVFPLAPSSKSTSGGTAALGCLVKDYFPEPVTVSWNSGALTSGVHTFPAVLQSSGLYSLESVVTVPSSSLGTQTYICNVNHKPSNTKVDKKVEPKSC

SEQ ID NO: 372 - protein, 211 aa, synthetic construct; identical to SEQ ID NO: 366
  REGION 1..211: note = source = /note="Description of Artificial Sequence: Synthetic polypeptide"

SEQ ID NO: 373 - DNA, 660 bp, synthetic construct; identical to SEQ ID NO: 302
  misc_feature 1..660: note = source = /note="Description of Artificial Sequence: Synthetic polynucleotide"
  source 1..660: mol_type = other DNA

SEQ ID NO: 374 - DNA, 2070 bp, synthetic construct
  misc_feature 1..2070: note = source = /note="Description of Artificial Sequence: Synthetic polynucleotide"
  source 1..2070: mol_type = other DNA
gaggtacaactggtggaatcaggtggaggtttggtgcagccggggagatcgctcaggcttagctgtgcggcatcggggtttactttcgatgattatgcgatgcattgggtccggaaagcgcctggaaaagggctcgagtgggtttccgccattacgtggaatagcggacacatcgattatgcagacagtgtggagggcagattcacaatctcacgagacaatgctaagaacagcctgtaccttcagatgaactcacttcgcgcggaagataccgccgtatactactgcgccaaagtctcctacttgtctacagcttcgtcgctcgactattggggtcaaggaacgttggtcaccgtctctagtacggtggctgcaccatctgtcttcatcttcccgccatctgatgagcagttgaaatctggaactgcctctgttgtgtgcctgctgaataacttctatcccagagaggccaaagtacagtggaaggtggataacgccctccaatcgggtaactcccaggagagtgtcacagagcaggacagcaaggacagcacctacagcctcaagagcaccctgacgctgagcaaagcagactacgagaaacacaaagtctacgcctgcgaagtcacccatcagggcctgagctcgcccgtcacaaagagcttcaacaggggagagtgtgacaaaactcacacatgcccaccgtgcccagcacctgaactcctggggggaccgtcagtcttcctcttccccccaaaacccaaggacaccctcatgatctcccggacccctgaggtcacatgcgtggtggtggacgtgagccacgaagaccctgaggtcaagttcaactggtacgtggacggcgtggaggtgcataatgccaagacaaagccgtgtgaggagcagtacggcagcacgtaccgttgtgtcagcgtcctcaccgtcctgcaccaggactggctgaatggcaaggagtacaagtgcaaggtctccaacaaagccctcccagcccccatcgagaaaaccatctccaaagccaaagggcagccccgagaaccacaggtgtacaccctgcccccatcccgggaggagatgaccaagaaccaggtcagcctgacctgcctggtcaaaggcttctatcccagcgacatcgccgtggagtgggagagcaatgggcagccggagaacaactacaagaccacgcctcccgtgctggactccgacggctccttcttcctctatagcaagctcaccgtggacaagagcaggtggcagcaggggaacgtcttctcatgctccgtgatgcatgaggctctgcacaaccactacacgcagaagagcctctccctgtctccgggtggtggcggatcgggaggtggcggatcccaggtacagttgcaggagtcaggtccaggactggtgaagccctcggagaccctctcactcacctgtaccatctccggggacagtgtctctaccaacagtgttgcttggaactggattaggaagcccccagggaaaggccttgagtggataggaaggacatactacaggtccaagtggtataatgattatgcagtttctctgaaaagtcgagtaaccatcagcccagacacatccaagaaccagttctccctgaagctgagctctgtgactgccgcggacacggctgtgtattactgtgcaagagaggatggggatagctactaccgctacggtatggacgtctggggccaagggaccacggtcaccgtctcctcagcctccaccaagggcccatcggtcttccccctggcaccctcctccaagagcacctctgggggcacagcggccctgggctgcctggtcaaggactacttccccgaaccggtgacggtgtcgtggaactcaggcgccctgaccagcggcgtgcacaccttcccggctgtcctacagtcctcaggactctactccctcgagagcgtggtgaccgtgccctccagcagcttgggcacccagacctacatctgcaacgtgaatcacaagcccagcaacaccaaggtggacaagaaagttgagcccaaatcttgt

SEQ ID NO: 375 - DNA, 633 bp, synthetic construct; identical to SEQ ID NO: 363
  misc_feature 1..633: note = source = /note="Description of Artificial Sequence: Synthetic polynucleotide"
  source 1..633: mol_type = other DNA

SEQ ID NO: 376 - protein, 220 aa, synthetic construct; identical to SEQ ID NO: 305
  REGION 1..220: note = source = /note="Description of Artificial Sequence: Synthetic polypeptide"

SEQ ID NO: 377 - protein, 690 aa, synthetic construct
  REGION 1..690: note = source = /note="Description of Artificial Sequence: Synthetic polypeptide"
EVQLVESGGGLVQPGRSLRLSCAASGFTFDDYAMHWVRKAPGKGLEWVSAITWNSGHIDYADSVEGRFTISRDNAKNSLYLQMNSLRAEDTAVYYCAKVSYLSTASSLDYWGQGTLVTVSSTVAAPSVFIFPPSDEQLKSGTASVVCLLNNFYPREAKVQWKVDNALQSGNSQESVTEQDSKDSTYSLKSTLTLSKADYEKHKVYACEVTHQGLSSPVTKSFNRGECDKTHTCPPCPAPELLGGPSVFLFPPKPKDTLMISRTPEVTCVVVDVSHEDPEVKFNWYVDGVEVHNAKTKPCEEQYGSTYRCVSVLTVLHQDWLNGKEYKCKVSNKALPAPIEKTISKAKGQPREPQVYTLPPSREEMTKNQVSLTCLVKGFYPSDIAVEWESNGQPENNYKTTPPVLDSDGSFFLYSKLTVDKSRWQQGNVFSCSVMHEALHNHYTQKSLSLSPGGGGSGGGGSQVQLQESGPGLVKPSETLSLTCTISGDSVSTNSVAWNWIRKPPGKGLEWIGRTYYRSKWYNDYAVSLKSRVTISPDTSKNQFSLKLSSVTAADTAVYYCAREDGDSYYRYGMDVWGQGTTVTVSSASTKGPSVFPLAPSSKSTSGGTAALGCLVKDYFPEPVTVSWNSGALTSGVHTFPAVLQSSGLYSLESVVTVPSSSLGTQTYICNVNHKPSNTKVDKKVEPKSC

SEQ ID NO: 378 - protein, 211 aa, synthetic construct; identical to SEQ ID NO: 366
  REGION 1..211: note = source = /note="Description of Artificial Sequence: Synthetic polypeptide"

SEQ ID NO: 379 - DNA, 642 bp, synthetic construct; identical to SEQ ID NO: 290
  misc_feature 1..642: note = source = /note="Description of Artificial Sequence: Synthetic polynucleotide"
  source 1..642: mol_type = other DNA

SEQ ID NO: 380 - DNA, 2037 bp, synthetic construct
  misc_feature 1..2037: note = source = /note="Description of Artificial Sequence: Synthetic polynucleotide"
  source 1..2037: mol_type = other DNA
gaggtgcagctggtgcagtctggagcagaggtgaaaaagcccggggagtctctgaagatctcctgtaagacttctgaatacagctttaccagctactggatcggctgggtgcgcaagatgcccgggaaaggcctggagtggatggggatcatctatcttggtgactcagataccagatacagcccgtccttccaaggccaggtcaccatctcagccgacaagtccatcagtaccgcctacctgcagtggagcagcctgaaggcctcggacaccgccatgtattactgtgcgagaagtaactggggtcttgactactggggccagggaaccctggtcaccgtctctagtcagcccaaggccaaccccactgtcactctgttcccgccctcctctgaggagctccaagccaacaaggccacactagtgtgtctgatcagtgacttctacccgggagctgtgacagtggcctggaaggcagatggcagccccgtcaaggcgggagtggagaccaccaaaccctccaaacagagcaacaacaagtacgcggccaagagctacctgagcctgacgcccgagcagtggaagtcccacagaagctacagctgccaggtcacgcatgaagggagcaccgtggagaagacagtggcccctacagaatgttcagacaaaactcacacatgcccaccgtgcccagcacctgaactcctggggggaccgtcagtcttcctcttccccccaaaacccaaggacaccctcatgatctcccggacccctgaggtcacatgcgtggtggtggacgtgagccacgaagaccctgaggtcaagttcaactggtacgtggacggcgtggaggtgcataatgccaagacaaagccgtgtgaggagcagtacggcagcacgtaccgttgtgtcagcgtcctcaccgtcctgcaccaggactggctgaatggcaaggagtacaagtgcaaggtctccaacaaagccctcccagcccccatcgagaaaaccatctccaaagccaaagggcagccccgagaaccacaggtgtacaccctgcccccatcccgggaggagatgaccaagaaccaggtcagcctgacctgcctggtcaaaggcttctatcccagcgacatcgccgtggagtgggagagcaatgggcagccggagaacaactacaagaccacgcctcccgtgctggactccgacggctccttcttcctctatagcaagctcaccgtggacaagagcaggtggcagcaggggaacgtcttctcatgctccgtgatgcatgaggctctgcacaaccactacacgcagaagagcctctccctgtctccgggtggtggcggatcgggaggtggcggatcccaggtgcagttacagcagtcgggcgcaggactgttgaagccttcggagaccctgtccctcacctgcgctgtccatggtgggtccttcagtggttactactggaactggattcgcaagccaccagggaaggggctagagtggattggggaaatcaatcatgctggaaacaccaactacaacccgtccctcaagagtcgagtcaccatatcattagacacgtccaagaaccagttctccctgacgctgacctctgtgaccgccgcggacacggctgtgtattactgtgcgagaggatattgtagaagtaccacctgctactttgactactggggccagggaaccctagtcaccgtctcctcagcctccaccaagggcccatcggtcttccccctggcaccctcctccaagagcacctctgggggcacagcggccctgggctgcctggtcaaggactacttccccgaaccggtgacggtgtcgtggaactcaggcgccctgaccagcggcgtgcacaccttcccggctgtcctacagtcctcaggactctactccctcgagagcgtggtgaccgtgccctccagcagcttgggcacccagacctacatctgcaacgtgaatcacaagcccagcaacaccaaggtggacaagaaagttgagcccaaatcttgt

SEQ ID NO: 381 - DNA, 645 bp, synthetic construct
  misc_feature 1..645: note = source = /note="Description of Artificial Sequence: Synthetic polynucleotide"
  source 1..645: mol_type = other DNA
cagtctgtgctgacgcagccgccctcagtgtctggggccccagggcagagggtcaccatctcctgcactgggagcagttccaacatcggggcaggttatgatgtacactggtaccaggagtttccaggaacagcccccaaactcctcatccaaggtaacagcaatcggccctcaggggtccctgaccgattctctggctccaagtctggcacctcagcctccctggccatcactgggctccaggctgaggatgaggctgattattactgccagtcctatgacagcagcctgagtggttcggtgttcggcggagggaccaagctgaccgtcctaggtgcctccaccaagggcccatcggtcttccccctggcaccctcctccaagagcacctctgggggcacagcggccctgggctgcctggtcaaggactacttccccgaaccggtgacggtgtcgtggaactcaggcgccctgaccagcggcgtgcacaccttcccggctgtcctacagtcctcaggactctactccctcgaaagcgtggtgaccgtgccctccagcagcttgggcacccagacctacatctgcaacgtgaatcacaagcccagcaacaccaaggtggacaagaaagttgagcccaaatcttgt

SEQ ID NO: 382 - protein, 214 aa, synthetic construct; identical to SEQ ID NO: 293
  REGION 1..214: note = source = /note="Description of Artificial Sequence: Synthetic polypeptide"

SEQ ID NO: 383 - protein, 679 aa, synthetic construct
  REGION 1..679: note = source = /note="Description of Artificial Sequence: Synthetic polypeptide"
EVQLVQSGAEVKKPGESLKISCKTSEYSFTSYWIGWVRKMPGKGLEWMGIIYLGDSDTRYSPSFQGQVTISADKSISTAYLQWSSLKASDTAMYYCARSNWGLDYWGQGTLVTVSSQPKANPTVTLFPPSSEELQANKATLVCLISDFYPGAVTVAWKADGSPVKAGVETTKPSKQSNNKYAAKSYLSLTPEQWKSHRSYSCQVTHEGSTVEKTVAPTECSDKTHTCPPCPAPELLGGPSVFLFPPKPKDTLMISRTPEVTCVVVDVSHEDPEVKFNWYVDGVEVHNAKTKPCEEQYGSTYRCVSVLTVLHQDWLNGKEYKCKVSNKALPAPIEKTISKAKGQPREPQVYTLPPSREEMTKNQVSLTCLVKGFYPSDIAVEWESNGQPENNYKTTPPVLDSDGSFFLYSKLTVDKSRWQQGNVFSCSVMHEALHNHYTQKSLSLSPGGGGSGGGGSQVQLQQSGAGLLKPSETLSLTCAVHGGSFSGYYWNWIRKPPGKGLEWIGEINHAGNTNYNPSLKSRVTISLDTSKNQFSLTLTSVTAADTAVYYCARGYCRSTTCYFDYWGQGTLVTVSSASTKGPSVFPLAPSSKSTSGGTAALGCLVKDYFPEPVTVSWNSGALTSGVHTFPAVLQSSGLYSLESVVTVPSSSLGTQTYICNVNHKPSNTKVDKKVEPKSC

SEQ ID NO: 384 - protein, 215 aa, synthetic construct
  REGION 1..215: note = source = /note="Description of Artificial Sequence: Synthetic polypeptide"
QSVLTQPPSVSGAPGQRVTISCTGSSSNIGAGYDVHWYQEFPGTAPKLLIQGNSNRPSGVPDRFSGSKSGTSASLAITGLQAEDEADYYCQSYDSSLSGSVFGGGTKLTVLGASTKGPSVFPLAPSSKSTSGGTAALGCLVKDYFPEPVTVSWNSGALTSGVHTFPAVLQSSGLYSLESVVTVPSSSLGTQTYICNVNHKPSNTKVDKKVEPKSC

SEQ ID NO: 385 - DNA, 642 bp, synthetic construct; identical to SEQ ID NO: 296
  misc_feature 1..642: note = source = /note="Description of Artificial Sequence: Synthetic polynucleotide"
  source 1..642: mol_type = other DNA

SEQ ID NO: 386 - DNA, 2031 bp, synthetic construct
  misc_feature 1..2031: note = source = /note="Description of Artificial Sequence: Synthetic polynucleotide"
  source 1..2031: mol_type = other DNA
gaggtgcagctggtgcagtctggagcagaggtgaaaaagcccggggagtctctgaagatctcctgtaagacttctgaatacagctttaccagctactggatcggctgggtgcgcaagatgcccgggaaaggcctggagtggatggggatcatctatcttggtgactcagataccagatacagcccgtccttccaaggccaggtcaccatctcagccgacaagtccatcagtaccgcctacctgcagtggagcagcctgaaggcctcggacaccgccatgtattactgtgcgagaagtaactggggtcttgactactggggccagggaaccctggtcaccgtctctagtcagcccaaggccaaccccactgtcactctgttcccgccctcctctgaggagctccaagccaacaaggccacactagtgtgtctgatcagtgacttctacccgggagctgtgacagtggcctggaaggcagatggcagccccgtcaaggcgggagtggagaccaccaaaccctccaaacagagcaacaacaagtacgcggccaagagctacctgagcctgacgcccgagcagtggaagtcccacagaagctacagctgccaggtcacgcatgaagggagcaccgtggagaagacagtggcccctacagaatgttcagacaaaactcacacatgcccaccgtgcccagcacctgaactcctggggggaccgtcagtcttcctcttccccccaaaacccaaggacaccctcatgatctcccggacccctgaggtcacatgcgtggtggtggacgtgagccacgaagaccctgaggtcaagttcaactggtacgtggacggcgtggaggtgcataatgccaagacaaagccgtgtgaggagcagtacggcagcacgtaccgttgtgtcagcgtcctcaccgtcctgcaccaggactggctgaatggcaaggagtacaagtgcaaggtctccaacaaagccctcccagcccccatcgagaaaaccatctccaaagccaaagggcagccccgagaaccacaggtgtacaccctgcccccatcccgggaggagatgaccaagaaccaggtcagcctgacctgcctggtcaaaggcttctatcccagcgacatcgccgtggagtgggagagcaatgggcagccggagaacaactacaagaccacgcctcccgtgctggactccgacggctccttcttcctctatagcaagctcaccgtggacaagagcaggtggcagcaggggaacgtcttctcatgctccgtgatgcatgaggctctgcacaaccactacacgcagaagagcctctccctgtctccgggtggtggcggatcgggaggtggcggatcccaggtgcagctgcaggagtcgggcccaggactggtgaagccttcggagaccctgtccctcacctgcactgtctctggtggctccatcagtagttacttctggagctggattcggaagcccccaggtaagggactggagtggattggctatatctattacagtgggcagaccaaatacaacccctccctcaagagtcgagtcaccatatcaatagacacgtccaagaaccagttctccctgaagctgagctctgtgaccgctgcggacacggccgtgtattactgtgcgagagaaactgggagctactacggctttgactactggggccagggaaccctggtcaccgtctcctcagcctccaccaagggcccatcggtcttccccctggcaccctcctccaagagcacctctgggggcacagcggccctgggctgcctggtcaaggactacttccccgaaccggtgacggtgtcgtggaactcaggcgccctgaccagcggcgtgcacaccttcccggctgtcctacagtcctcaggactctactccctcgagagcgtggtgaccgtgccctccagcagcttgggcacccagacctacatctgcaacgtgaatcacaagcccagcaacaccaaggtggacaagaaagttgagcccaaatcttgt

SEQ ID NO: 387 - DNA, 645 bp, synthetic construct; identical to SEQ ID NO: 381
  misc_feature 1..645: note = source = /note="Description of Artificial Sequence: Synthetic polynucleotide"
  source 1..645: mol_type = other DNA

SEQ ID NO: 388 - protein, 214 aa, synthetic construct; identical to SEQ ID NO: 299
  REGION 1..214: note = source = /note="Description of Artificial Sequence: Synthetic polypeptide"

SEQ ID NO: 389 - protein, 677 aa, synthetic construct
  REGION 1..677: note = source = /note="Description of Artificial Sequence: Synthetic polypeptide"
EVQLVQSGAEVKKPGESLKISCKTSEYSFTSYWIGWVRKMPGKGLEWMGIIYLGDSDTRYSPSFQGQVTISADKSISTAYLQWSSLKASDTAMYYCARSNWGLDYWGQGTLVTVSSQPKANPTVTLFPPSSEELQANKATLVCLISDFYPGAVTVAWKADGSPVKAGVETTKPSKQSNNKYAAKSYLSLTPEQWKSHRSYSCQVTHEGSTVEKTVAPTECSDKTHTCPPCPAPELLGGPSVFLFPPKPKDTLMISRTPEVTCVVVDVSHEDPEVKFNWYVDGVEVHNAKTKPCEEQYGSTYRCVSVLTVLHQDWLNGKEYKCKVSNKALPAPIEKTISKAKGQPREPQVYTLPPSREEMTKNQVSLTCLVKGFYPSDIAVEWESNGQPENNYKTTPPVLDSDGSFFLYSKLTVDKSRWQQGNVFSCSVMHEALHNHYTQKSLSLSPGGGGSGGGGSQVQLQESGPGLVKPSETLSLTCTVSGGSISSYFWSWIRKPPGKGLEWIGYIYYSGQTKYNPSLKSRVTISIDTSKNQFSLKLSSVTAADTAVYYCARETGSYYGFDYWGQGTLVTVSSASTKGPSVFPLAPSSKSTSGGTAALGCLVKDYFPEPVTVSWNSGALTSGVHTFPAVLQSSGLYSLESVVTVPSSSLGTQTYICNVNHKPSNTKVDKKVEPKSC

SEQ ID NO: 390 - protein, 215 aa, synthetic construct; identical to SEQ ID NO: 384
  REGION 1..215: note = source = /note="Description of Artificial Sequence: Synthetic polypeptide"

SEQ ID NO: 391 - DNA, 660 bp, synthetic construct; identical to SEQ ID NO: 302
  misc_feature 1..660: note = source = /note="Description of Artificial Sequence: Synthetic polynucleotide"
  source 1..660: mol_type = other DNA

SEQ ID NO: 392 - DNA, 2052 bp, synthetic construct
  misc_feature 1..2052: note = source = /note="Description of Artificial Sequence: Synthetic polynucleotide"
  source 1..2052: mol_type = other DNA
gaggtgcagctggtgcagtctggagcagaggtgaaaaagcccggggagtctctgaagatctcctgtaagacttctgaatacagctttaccagctactggatcggctgggtgcgcaagatgcccgggaaaggcctggagtggatggggatcatctatcttggtgactcagataccagatacagcccgtccttccaaggccaggtcaccatctcagccgacaagtccatcagtaccgcctacctgcagtggagcagcctgaaggcctcggacaccgccatgtattactgtgcgagaagtaactggggtcttgactactggggccagggaaccctggtcaccgtctctagtcagcccaaggccaaccccactgtcactctgttcccgccctcctctgaggagctccaagccaacaaggccacactagtgtgtctgatcagtgacttctacccgggagctgtgacagtggcctggaaggcagatggcagccccgtcaaggcgggagtggagaccaccaaaccctccaaacagagcaacaacaagtacgcggccaagagctacctgagcctgacgcccgagcagtggaagtcccacagaagctacagctgccaggtcacgcatgaagggagcaccgtggagaagacagtggcccctacagaatgttcagacaaaactcacacatgcccaccgtgcccagcacctgaactcctggggggaccgtcagtcttcctcttccccccaaaacccaaggacaccctcatgatctcccggacccctgaggtcacatgcgtggtggtggacgtgagccacgaagaccctgaggtcaagttcaactggtacgtggacggcgtggaggtgcataatgccaagacaaagccgtgtgaggagcagtacggcagcacgtaccgttgtgtcagcgtcctcaccgtcctgcaccaggactggctgaatggcaaggagtacaagtgcaaggtctccaacaaagccctcccagcccccatcgagaaaaccatctccaaagccaaagggcagccccgagaaccacaggtgtacaccctgcccccatcccgggaggagatgaccaagaaccaggtcagcctgacctgcctggtcaaaggcttctatcccagcgacatcgccgtggagtgggagagcaatgggcagccggagaacaactacaagaccacgcctcccgtgctggactccgacggctccttcttcctctatagcaagctcaccgtggacaagagcaggtggcagcaggggaacgtcttctcatgctccgtgatgcatgaggctctgcacaaccactacacgcagaagagcctctccctgtctccgggtggtggcggatcgggaggtggcggatcccaggtacagttgcaggagtcaggtccaggactggtgaagccctcggagaccctctcactcacctgtaccatctccggggacagtgtctctaccaacagtgttgcttggaactggattaggaagcccccagggaaaggccttgagtggataggaaggacatactacaggtccaagtggtataatgattatgcagtttctctgaaaagtcgagtaaccatcagcccagacacatccaagaaccagttctccctgaagctgagctctgtgactgccgcggacacggctgtgtattactgtgcaagagaggatggggatagctactaccgctacggtatggacgtctggggccaagggaccacggtcaccgtctcctcagcctccaccaagggcccatcggtcttccccctggcaccctcctccaagagcacctctgggggcacagcggccctgggctgcctggtcaaggactacttccccgaaccggtgacggtgtcgtggaactcaggcgccctgaccagcggcgtgcacaccttcccggctgtcctacagtcctcaggactctactccctcgagagcgtggtgaccgtgccctccagcagcttgggcacccagacctacatctgcaacgtgaatcacaagcccagcaacaccaaggtggacaagaaagttgagcccaaatcttgt

SEQ ID NO: 393 - DNA, 645 bp, synthetic construct; identical to SEQ ID NO: 381
  misc_feature 1..645: note = source = /note="Description of Artificial Sequence: Synthetic polynucleotide"
  source 1..645: mol_type = other DNA

SEQ ID NO: 394 - protein, 220 aa, synthetic construct; identical to SEQ ID NO: 305
  REGION 1..220: note = source = /note="Description of Artificial Sequence: Synthetic polypeptide"

SEQ ID NO: 395 - protein, 684 aa, synthetic construct
  REGION 1..684: note = source = /note="Description of Artificial Sequence: Synthetic polypeptide"
EVQLVQSGAEVKKPGESLKISCKTSEYSFTSYWIGWVRKMPGKGLEWMGIIYLGDSDTRYSPSFQGQVTISADKSISTAYLQWSSLKASDTAMYYCARSNWGLDYWGQGTLVTVSSQPKANPTVTLFPPSSEELQANKATLVCLISDFYPGAVTVAWKADGSPVKAGVETTKPSKQSNNKYAAKSYLSLTPEQWKSHRSYSCQVTHEGSTVEKTVAPTECSDKTHTCPPCPAPELLGGPSVFLFPPKPKDTLMISRTPEVTCVVVDVSHEDPEVKFNWYVDGVEVHNAKTKPCEEQYGSTYRCVSVLTVLHQDWLNGKEYKCKVSNKALPAPIEKTISKAKGQPREPQVYTLPPSREEMTKNQVSLTCLVKGFYPSDIAVEWESNGQPENNYKTTPPVLDSDGSFFLYSKLTVDKSRWQQGNVFSCSVMHEALHNHYTQKSLSLSPGGGGSGGGGSQVQLQESGPGLVKPSETLSLTCTISGDSVSTNSVAWNWIRKPPGKGLEWIGRTYYRSKWYNDYAVSLKSRVTISPDTSKNQFSLKLSSVTAADTAVYYCAREDGDSYYRYGMDVWGQGTTVTVSSASTKGPSVFPLAPSSKSTSGGTAALGCLVKDYFPEPVTVSWNSGALTSGVHTFPAVLQSSGLYSLESVVTVPSSSLGTQTYICNVNHKPSNTKVDKKVEPKSC

SEQ ID NO: 396 - protein, 215 aa, synthetic construct; identical to SEQ ID NO: 384
  REGION 1..215: note = source = /note="Description of Artificial Sequence: Synthetic polypeptide"

SEQ ID NO: 397 - DNA, 642 bp, synthetic construct; identical to SEQ ID NO: 326
  misc_feature 1..642: note = source = /note="Description of Artificial Sequence: Synthetic polynucleotide"
  source 1..642: mol_type = other DNA

SEQ ID NO: 398 - DNA, 2055 bp, synthetic construct
  misc_feature 1..2055: note = source = /note="Description of Artificial Sequence: Synthetic polynucleotide"
  source 1..2055: mol_type = other DNA
caggtgcagttacagcagtcgggcgcaggactgttgaagccttcggagaccctgtccctcacctgcgctgtccatggtgggtccttcagtggttactactggaactggattcgcaagccaccagggaaggggctagagtggattggggaaatcaatcatgctggaaacaccaactacaacccgtccctcaagagtcgagtcaccatatcattagacacgtccaagaaccagttctccctgacgctgacctctgtgaccgccgcggacacggctgtgtattactgtgcgagaggatattgtagaagtaccacctgctactttgactactggggccagggaaccctagtcaccgtctcctcaacggtggctgcaccatctgtcttcatcttcccgccatctgatgagcagttgaaatctggaactgcctctgttgtgtgcctgctgaataacttctatcccagagaggccaaagtacagtggaaggtggataacgccctccaatcgggtaactcccaggagagtgtcacagagcaggacagcaaggacagcacctacagcctcaagagcaccctgacgctgagcaaagcagactacgagaaacacaaagtctacgcctgcgaagtcacccatcagggcctgagctcgcccgtcacaaagagcttcaacaggggagagtgtgacaaaactcacacatgcccaccgtgcccagcacctgaactcctggggggaccgtcagtcttcctcttccccccaaaacccaaggacaccctcatgatctcccggacccctgaggtcacatgcgtggtggtggacgtgagccacgaagaccctgaggtcaagttcaactggtacgtggacggcgtggaggtgcataatgccaagacaaagccgtgtgaggagcagtacggcagcacgtaccgttgtgtcagcgtcctcaccgtcctgcaccaggactggctgaatggcaaggagtacaagtgcaaggtctccaacaaagccctcccagcccccatcgagaaaaccatctccaaagccaaagggcagccccgagaaccacaggtgtacaccctgcccccatcccgggaggagatgaccaagaaccaggtcagcctgacctgcctggtcaaaggcttctatcccagcgacatcgccgtggagtgggagagcaatgggcagccggagaacaactacaagaccacgcctcccgtgctggactccgacggctccttcttcctctatagcaagctcaccgtggacaagagcaggtggcagcaggggaacgtcttctcatgctccgtgatgcatgaggctctgcacaaccactacacgcagaagagcctctccctgtctccgggtggtggcggatcgggaggtggcggatccgaggtacaactggtggaatcaggtggaggtttggtgcagccggggagatcgctcaggcttagctgtgcggcatcggggtttactttcgatgattatgcgatgcattgggtccggaaagcgcctggaaaagggctcgagtgggtttccgccattacgtggaatagcggacacatcgattatgcagacagtgtggagggcagattcacaatctcacgagacaatgctaagaacagcctgtaccttcagatgaactcacttcgcgcggaagataccgccgtatactactgcgccaaagtctcctacttgtctacagcttcgtcgctcgactattggggtcaaggaacgttggtcaccgtctctagtgcctccaccaagggcccatcggtcttccccctggcaccctcctccaagagcacctctgggggcacagcggccctgggctgcctggtcaaggactacttccccgaaccggtgacggtgtcgtggaactcaggcgccctgaccagcggcgtgcacaccttcccggctgtcctacagtcctcaggactctactccctcgagagcgtggtgaccgtgccctccagcagcttgggcacccagacctacatctgcaacgtgaatcacaagcccagcaacaccaaggtggacaagaaagttgagcccaaatcttgt

SEQ ID NO: 399 - DNA, 633 bp, synthetic construct
  misc_feature 1..633: note = source = /note="Description of Artificial Sequence: Synthetic polynucleotide"
  source 1..633: mol_type = other DNA
gaaattgtgttgacgcagtctccaggcaccctgtctttgtctccaggggaaagagccaccctctcctgcagggccagtcagagtgttagaagcagttacttagcctggtaccaggagaaacctggccaggctcccaggctcctcatctatggtgcatccagcagggccactggcatcccagacaggttcagtggcagtgggtctgggacagacttcactctcaccatcagcagactggagcctgaagattttgcagtgtattactgtcagcagtatggtagctcacctaccttcggccaagggacacgactggagattaaacgagcctccaccaagggcccatcggtcttccccctggcaccctcctccaagagcacctctgggggcacagcggccctgggctgcctggtcaaggactacttccccgaaccggtgacggtgtcgtggaactcaggcgccctgaccagcggcgtgcacaccttcccggctgtcctacagtcctcaggactctactccctcgaaagcgtggtgaccgtgccctccagcagcttgggcacccagacctacatctgcaacgtgaatcacaagcccagcaacaccaaggtggacaagaaagttgagcccaaatcttgt

SEQ ID NO: 400 - protein, 214 aa, synthetic construct; identical to SEQ ID NO: 329
  REGION 1..214: note = source = /note="Description of Artificial Sequence: Synthetic polypeptide"

SEQ ID NO: 401 - protein, 685 aa, synthetic construct
  REGION 1..685: note = source = /note="Description of Artificial Sequence: Synthetic polypeptide"
QVQLQQSGAGLLKPSETLSLTCAVHGGSFSGYYWNWIRKPPGKGLEWIGEINHAGNTNYNPSLKSRVTISLDTSKNQFSLTLTSVTAADTAVYYCARGYCRSTTCYFDYWGQGTLVTVSSTVAAPSVFIFPPSDEQLKSGTASVVCLLNNFYPREAKVQWKVDNALQSGNSQESVTEQDSKDSTYSLKSTLTLSKADYEKHKVYACEVTHQGLSSPVTKSFNRGECDKTHTCPPCPAPELLGGPSVFLFPPKPKDTLMISRTPEVTCVVVDVSHEDPEVKFNWYVDGVEVHNAKTKPCEEQYGSTYRCVSVLTVLHQDWLNGKEYKCKVSNKALPAPIEKTISKAKGQPREPQVYTLPPSREEMTKNQVSLTCLVKGFYPSDIAVEWESNGQPENNYKTTPPVLDSDGSFFLYSKLTVDKSRWQQGNVFSCSVMHEALHNHYTQKSLSLSPGGGGSGGGGSEVQLVESGGGLVQPGRSLRLSCAASGFTFDDYAMHWVRKAPGKGLEWVSAITWNSGHIDYADSVEGRFTISRDNAKNSLYLQMNSLRAEDTAVYYCAKVSYLSTASSLDYWGQGTLVTVSSASTKGPSVFPLAPSSKSTSGGTAALGCLVKDYFPEPVTVSWNSGALTSGVHTFPAVLQSSGLYSLESVVTVPSSSLGTQTYICNVNHKPSNTKVDKKVEPKSC

SEQ ID NO: 402 - protein, 211 aa, synthetic construct
  REGION 1..211: note = source = /note="Description of Artificial Sequence: Synthetic polypeptide"
EIVLTQSPGTLSLSPGERATLSCRASQSVRSSYLAWYQEKPGQAPRLLIYGASSRATGIPDRFSGSGSGTDFTLTISRLEPEDFAVYYCQQYGSSPTFGQGTRLEIKRASTKGPSVFPLAPSSKSTSGGTAALGCLVKDYFPEPVTVSWNSGALTSGVHTFPAVLQSSGLYSLESVVTVPSSSLGTQTYICNVNHKPSNTKVDKKVEPKSC

SEQ ID NO: 403 - DNA, 651 bp, synthetic construct; identical to SEQ ID NO: 332
  misc_feature 1..651: note = source = /note="Description of Artificial Sequence: Synthetic polynucleotide"
  source 1..651: mol_type = other DNA

SEQ ID NO: 404 - DNA, 2040 bp, synthetic construct
  misc_feature 1..2040: note = source = /note="Description of Artificial Sequence: Synthetic polynucleotide"
  source 1..2040: mol_type = other DNA
caggtgcagttacagcagtcgggcgcaggactgttgaagccttcggagaccctgtccctcacctgcgctgtccatggtgggtccttcagtggttactactggaactggattcgcaagccaccagggaaggggctagagtggattggggaaatcaatcatgctggaaacaccaactacaacccgtccctcaagagtcgagtcaccatatcattagacacgtccaagaaccagttctccctgacgctgacctctgtgaccgccgcggacacggctgtgtattactgtgcgagaggatattgtagaagtaccacctgctactttgactactggggccagggaaccctagtcaccgtctcctcaacggtggctgcaccatctgtcttcatcttcccgccatctgatgagcagttgaaatctggaactgcctctgttgtgtgcctgctgaataacttctatcccagagaggccaaagtacagtggaaggtggataacgccctccaatcgggtaactcccaggagagtgtcacagagcaggacagcaaggacagcacctacagcctcaagagcaccctgacgctgagcaaagcagactacgagaaacacaaagtctacgcctgcgaagtcacccatcagggcctgagctcgcccgtcacaaagagcttcaacaggggagagtgtgacaaaactcacacatgcccaccgtgcccagcacctgaactcctggggggaccgtcagtcttcctcttccccccaaaacccaaggacaccctcatgatctcccggacccctgaggtcacatgcgtggtggtggacgtgagccacgaagaccctgaggtcaagttcaactggtacgtggacggcgtggaggtgcataatgccaagacaaagccgtgtgaggagcagtacggcagcacgtaccgttgtgtcagcgtcctcaccgtcctgcaccaggactggctgaatggcaaggagtacaagtgcaaggtctccaacaaagccctcccagcccccatcgagaaaaccatctccaaagccaaagggcagccccgagaaccacaggtgtacaccctgcccccatcccgggaggagatgaccaagaaccaggtcagcctgacctgcctggtcaaaggcttctatcccagcgacatcgccgtggagtgggagagcaatgggcagccggagaacaactacaagaccacgcctcccgtgctggactccgacggctccttcttcctctatagcaagctcaccgtggacaagagcaggtggcagcaggggaacgtcttctcatgctccgtgatgcatgaggctctgcacaaccactacacgcagaagagcctctccctgtctccgggtggtggcggatcgggaggtggcggatccgaggtgcagctggtgcagtctggagcagaggtgaaaaagcccggggagtctctgaagatctcctgtaagacttctgaatacagctttaccagctactggatcggctgggtgcgcaagatgcccgggaaaggcctggagtggatggggatcatctatcttggtgactcagataccagatacagcccgtccttccaaggccaggtcaccatctcagccgacaagtccatcagtaccgcctacctgcagtggagcagcctgaaggcctcggacaccgccatgtattactgtgcgagaagtaactggggtcttgactactggggccagggaaccctggtcaccgtctctagtgcctccaccaagggcccatcggtcttccccctggcaccctcctccaagagcacctctgggggcacagcggccctgggctgcctggtcaaggactacttccccgaaccggtgacggtgtcgtggaactcaggcgccctgaccagcggcgtgcacaccttcccggctgtcctacagtcctcaggactctactccctcgagagcgtggtgaccgtgccctccagcagcttgggcacccagacctacatctgcaacgtgaatcacaagcccagcaacaccaaggtggacaagaaagttgagcccaaatcttgt

SEQ ID NO: 405 - DNA, 633 bp, synthetic construct; identical to SEQ ID NO: 399
  misc_feature 1..633: note = source = /note="Description of Artificial Sequence: Synthetic polynucleotide"
  source 1..633: mol_type = other DNA

SEQ ID NO: 406 - protein, 217 aa, synthetic construct; identical to SEQ ID NO: 335
  REGION 1..217: note = source = /note="Description of Artificial Sequence: Synthetic polypeptide"

SEQ ID NO: 407 - protein, 680 aa, synthetic construct
  REGION 1..680: note = source = /note="Description of Artificial Sequence: Synthetic polypeptide"
QVQLQQSGAGLLKPSETLSLTCAVHGGSFSGYYWNWIRKPPGKGLEWIGEINHAGNTNYNPSLKSRVTISLDTSKNQFSLTLTSVTAADTAVYYCARGYCRSTTCYFDYWGQGTLVTVSSTVAAPSVFIFPPSDEQLKSGTASVVCLLNNFYPREAKVQWKVDNALQSGNSQESVTEQDSKDSTYSLKSTLTLSKADYEKHKVYACEVTHQGLSSPVTKSFNRGECDKTHTCPPCPAPELLGGPSVFLFPPKPKDTLMISRTPEVTCVVVDVSHEDPEVKFNWYVDGVEVHNAKTKPCEEQYGSTYRCVSVLTVLHQDWLNGKEYKCKVSNKALPAPIEKTISKAKGQPREPQVYTLPPSREEMTKNQVSLTCLVKGFYPSDIAVEWESNGQPENNYKTTPPVLDSDGSFFLYSKLTVDKSRWQQGNVFSCSVMHEALHNHYTQKSLSLSPGGGGSGGGGSEVQLVQSGAEVKKPGESLKISCKTSEYSFTSYWIGWVRKMPGKGLEWMGIIYLGDSDTRYSPSFQGQVTISADKSISTAYLQWSSLKASDTAMYYCARSNWGLDYWGQGTLVTVSSASTKGPSVFPLAPSSKSTSGGTAALGCLVKDYFPEPVTVSWNSGALTSGVHTFPAVLQSSGLYSLESVVTVPSSSLGTQTYICNVNHKPSNTKVDKKVEPKSC

SEQ ID NO: 408 - protein, 211 aa, synthetic construct; identical to SEQ ID NO: 402
  REGION 1..211: note = source = /note="Description of Artificial Sequence: Synthetic polypeptide"

SEQ ID NO: 409 - DNA, 642 bp, synthetic construct; identical to SEQ ID NO: 326
  misc_feature 1..642: note = source = /note="Description of Artificial Sequence: Synthetic polynucleotide"
  source 1..642: mol_type = other DNA

SEQ ID NO: 410 - DNA, 2049 bp, synthetic construct
  misc_feature 1..2049: note = source = /note="Description of Artificial Sequence: Synthetic polynucleotide"
  source 1..2049: mol_type = other DNA
caggtgcagctgcaggagtcgggcccaggactggtgaagccttcggagaccctgtccctcacctgcactgtctctggtggctccatcagtagttacttctggagctggattcggaagcccccaggtaagggactggagtggattggctatatctattacagtgggcagaccaaatacaacccctccctcaagagtcgagtcaccatatcaatagacacgtccaagaaccagttctccctgaagctgagctctgtgaccgctgcggacacggccgtgtattactgtgcgagagaaactgggagctactacggctttgactactggggccagggaaccctggtcaccgtctcctcaacggtggctgcaccatctgtcttcatcttcccgccatctgatgagcagttgaaatctggaactgcctctgttgtgtgcctgctgaataacttctatcccagagaggccaaagtacagtggaaggtggataacgccctccaatcgggtaactcccaggagagtgtcacagagcaggacagcaaggacagcacctacagcctcaagagcaccctgacgctgagcaaagcagactacgagaaacacaaagtctacgcctgcgaagtcacccatcagggcctgagctcgcccgtcacaaagagcttcaacaggggagagtgtgacaaaactcacacatgcccaccgtgcccagcacctgaactcctggggggaccgtcagtcttcctcttccccccaaaacccaaggacaccctcatgatctcccggacccctgaggtcacatgcgtggtggtggacgtgagccacgaagaccctgaggtcaagttcaactggtacgtggacggcgtggaggtgcataatgccaagacaaagccgtgtgaggagcagtacggcagcacgtaccgttgtgtcagcgtcctcaccgtcctgcaccaggactggctgaatggcaaggagtacaagtgcaaggtctccaacaaagccctcccagcccccatcgagaaaaccatctccaaagccaaagggcagccccgagaaccacaggtgtacaccctgcccccatcccgggaggagatgaccaagaaccaggtcagcctgacctgcctggtcaaaggcttctatcccagcgacatcgccgtggagtgggagagcaatgggcagccggagaacaactacaagaccacgcctcccgtgctggactccgacggctccttcttcctctatagcaagctcaccgtggacaagagcaggtggcagcaggggaacgtcttctcatgctccgtgatgcatgaggctctgcacaaccactacacgcagaagagcctctccctgtctccgggtggtggcggatcgggaggtggcggatccgaggtacaactggtggaatcaggtggaggtttggtgcagccggggagatcgctcaggcttagctgtgcggcatcggggtttactttcgatgattatgcgatgcattgggtccggaaagcgcctggaaaagggctcgagtgggtttccgccattacgtggaatagcggacacatcgattatgcagacagtgtggagggcagattcacaatctcacgagacaatgctaagaacagcctgtaccttcagatgaactcacttcgcgcggaagataccgccgtatactactgcgccaaagtctcctacttgtctacagcttcgtcgctcgactattggggtcaaggaacgttggtcaccgtctctagtgcctccaccaagggcccatcggtcttccccctggcaccctcctccaagagcacctctgggggcacagcggccctgggctgcctggtcaaggactacttccccgaaccggtgacggtgtcgtggaactcaggcgccctgaccagcggcgtgcacaccttcccggctgtcctacagtcctcaggactctactccctcgagagcgtggtgaccgtgccctccagcagcttgggcacccagacctacatctgcaacgtgaatcacaagcccagcaacaccaaggtggacaagaaagttgagcccaaatcttgt

SEQ ID NO: 411 - DNA, 633 bp, synthetic construct
  misc_feature 1..633: note = source = /note="Description of Artificial Sequence: Synthetic polynucleotide"
  source 1..633: mol_type = other DNA
gacatccagatgacccagtctccatcctccctgtctgcatctgtaggagacagagtcaccatcacttgccgggcaagtcagagcattaacaactatttaaattggtatcaggagagaccagggaaagcccctaagctcctgatctatgctgcatccagtttgcaaagtggggtcccatcaaggttcagtggcagtggatctgggacagatttcactctcaccatcagcagtctgcaacctgaagattttgcaacttactactgtcaacagagttacagtacccctcggacgttcggccaagggaccaagctggaaatcaaacgagcctccaccaagggcccatcggtcttccccctggcaccctcctccaagagcacctctgggggcacagcggccctgggctgcctggtcaaggactacttccccgaaccggtgacggtgtcgtggaactcaggcgccctgaccagcggcgtgcacaccttcccggctgtcctacagtcctcaggactctactccctcgaaagcgtggtgaccgtgccctccagcagcttgggcacccagacctacatctgcaacgtgaatcacaagcccagcaacaccaaggtggacaagaaagttgagcccaaatcttgt

SEQ ID NO: 412 - protein, 214 aa, synthetic construct; identical to SEQ ID NO: 329
  REGION 1..214: note = source = /note="Description of Artificial Sequence: Synthetic polypeptide"

SEQ ID NO: 413 - protein, 683 aa, synthetic construct
  REGION 1..683: note = source = /note="Description of Artificial Sequence: Synthetic polypeptide"
QVQLQESGPGLVKPSETLSLTCTVSGGSISSYFWSWIRKPPGKGLEWIGYIYYSGQTKYNPSLKSRVTISIDTSKNQFSLKLSSVTAADTAVYYCARETGSYYGFDYWGQGTLVTVSSTVAAPSVFIFPPSDEQLKSGTASVVCLLNNFYPREAKVQWKVDNALQSGNSQESVTEQDSKDSTYSLKSTLTLSKADYEKHKVYACEVTHQGLSSPVTKSFNRGECDKTHTCPPCPAPELLGGPSVFLFPPKPKDTLMISRTPEVTCVVVDVSHEDPEVKFNWYVDGVEVHNAKTKPCEEQYGSTYRCVSVLTVLHQDWLNGKEYKCKVSNKALPAPIEKTISKAKGQPREPQVYTLPPSREEMTKNQVSLTCLVKGFYPSDIAVEWESNGQPENNYKTTPPVLDSDGSFFLYSKLTVDKSRWQQGNVFSCSVMHEALHNHYTQKSLSLSPGGGGSGGGGSEVQLVESGGGLVQPGRSLRLSCAASGFTFDDYAMHWVRKAPGKGLEWVSAITWNSGHIDYADSVEGRFTISRDNAKNSLYLQMNSLRAEDTAVYYCAKVSYLSTASSLDYWGQGTLVTVSSASTKGPSVFPLAPSSKSTSGGTAALGCLVKDYFPEPVTVSWNSGALTSGVHTFPAVLQSSGLYSLESVVTVPSSSLGTQTYICNVNHKPSNTKVDKKVEPKSC

SEQ ID NO: 414 - protein, 211 aa, synthetic construct
  REGION 1..211: note = source = /note="Description of Artificial Sequence: Synthetic polypeptide"
DIQMTQSPSSLSASVGDRVTITCRASQSINNYLNWYQERPGKAPKLLIYAASSLQSGVPSRFSGSGSGTDFTLTISSLQPEDFATYYCQQSYSTPRTFGQGTKLEIKRASTKGPSVFPLAPSSKSTSGGTAALGCLVKDYFPEPVTVSWNSGALTSGVHTFPAVLQSSGLYSLESVVTVPSSSLGTQTYICNVNHKPSNTKVDKKVEPKSC

SEQ ID NO: 415 - DNA, 651 bp, synthetic construct; identical to SEQ ID NO: 332
  misc_feature 1..651: note = source = /note="Description of Artificial Sequence: Synthetic polynucleotide"
  source 1..651: mol_type = other DNA

SEQ ID NO: 416 - DNA, 2034 bp, synthetic construct
  misc_feature 1..2034: note = source = /note="Description of Artificial Sequence: Synthetic polynucleotide"
  source 1..2034: mol_type = other DNA
caggtgcagctgcaggagtcgggcccaggactggtgaagccttcggagaccctgtccctcacctgcactgtctctggtggctccatcagtagttacttctggagctggattcggaagcccccaggtaagggactggagtggattggctatatctattacagtgggcagaccaaatacaacccctccctcaagagtcgagtcaccatatcaatagacacgtccaagaaccagttctccctgaagctgagctctgtgaccgctgcggacacggccgtgtattactgtgcgagagaaactgggagctactacggctttgactactggggccagggaaccctggtcaccgtctcctcaacggtggctgcaccatctgtcttcatcttcccgccatctgatgagcagttgaaatctggaactgcctctgttgtgtgcctgctgaataacttctatcccagagaggccaaagtacagtggaaggtggataacgccctccaatcgggtaactcccaggagagtgtcacagagcaggacagcaaggacagcacctacagcctcaagagcaccctgacgctgagcaaagcagactacgagaaacacaaagtctacgcctgcgaagtcacccatcagggcctgagctcgcccgtcacaaagagcttcaacaggggagagtgtgacaaaactcacacatgcccaccgtgcccagcacctgaactcctggggggaccgtcagtcttcctcttccccccaaaacccaaggacaccctcatgatctcccggacccctgaggtcacatgcgtggtggtggacgtgagccacgaagaccctgaggtcaagttcaactggtacgtggacggcgtggaggtgcataatgccaagacaaagccgtgtgaggagcagtacggcagcacgtaccgttgtgtcagcgtcctcaccgtcctgcaccaggactggctgaatggcaaggagtacaagtgcaaggtctccaacaaagccctcccagcccccatcgagaaaaccatctccaaagccaaagggcagccccgagaaccacaggtgtacaccctgcccccatcccgggaggagatgaccaagaaccaggtcagcctgacctgcctggtcaaaggcttctatcccagcgacatcgccgtggagtgggagagcaatgggcagccggagaacaactacaagaccacgcctcccgtgctggactccgacggctccttcttcctctatagcaagctcaccgtggacaagagcaggtggcagcaggggaacgtcttctcatgctccgtgatgcatgaggctctgcacaaccactacacgcagaagagcctctccctgtctccgggtggtggcggatcgggaggtggcggatccgaggtgcagctggtgcagtctggagcagaggtgaaaaagcccggggagtctctgaagatctcctgtaagacttctgaatacagctttaccagctactggatcggctgggtgcgcaagatgcccgggaaaggcctggagtggatggggatcatctatcttggtgactcagataccagatacagcccgtccttccaaggccaggtcaccatctcagccgacaagtccatcagtaccgcctacctgcagtggagcagcctgaaggcctcggacaccgccatgtattactgtgcgagaagtaactggggtcttgactactggggccagggaaccctggtcaccgtctctagtgcctccaccaagggcccatcggtcttccccctggcaccctcctccaagagcacctctgggggcacagcggccctgggctgcctggtcaaggactacttccccgaaccggtgacggtgtcgtggaactcaggcgccctgaccagcggcgtgcacaccttcccggctgtcctacagtcctcaggactctactccctcgagagcgtggtgaccgtgccctccagcagcttgggcacccagacctacatctgcaacgtgaatcacaagcccagcaacaccaaggtggacaagaaagttgagcccaaatcttgt

SEQ ID NO: 417 - DNA, 633 bp, synthetic construct; identical to SEQ ID NO: 411
  misc_feature 1..633: note = source = /note="Description of Artificial Sequence: Synthetic polynucleotide"
  source 1..633: mol_type = other DNA

SEQ ID NO: 418 - protein, 217 aa, synthetic construct; identical to SEQ ID NO: 335
  REGION 1..217: note = source = /note="Description of Artificial Sequence: Synthetic polypeptide"

SEQ ID NO: 419 - protein, 678 aa, synthetic construct
  REGION 1..678: note = source = /note="Description of Artificial Sequence: Synthetic polypeptide"
QVQLQESGPGLVKPSETLSLTCTVSGGSISSYFWSWIRKPPGKGLEWIGYIYYSGQTKYNPSLKSRVTISIDTSKNQFSLKLSSVTAADTAVYYCARETGSYYGFDYWGQGTLVTVSSTVAAPSVFIFPPSDEQLKSGTASVVCLLNNFYPREAKVQWKVDNALQSGNSQESVTEQDSKDSTYSLKSTLTLSKADYEKHKVYACEVTHQGLSSPVTKSFNRGECDKTHTCPPCPAPELLGGPSVFLFPPKPKDTLMISRTPEVTCVVVDVSHEDPEVKFNWYVDGVEVHNAKTKPCEEQYGSTYRCVSVLTVLHQDWLNGKEYKCKVSNKALPAPIEKTISKAKGQPREPQVYTLPPSREEMTKNQVSLTCLVKGFYPSDIAVEWESNGQPENNYKTTPPVLDSDGSFFLYSKLTVDKSRWQQGNVFSCSVMHEALHNHYTQKSLSLSPGGGGSGGGGSEVQLVQSGAEVKKPGESLKISCKTSEYSFTSYWIGWVRKMPGKGLEWMGIIYLGDSDTRYSPSFQGQVTISADKSISTAYLQWSSLKASDTAMYYCARSNWGLDYWGQGTLVTVSSASTKGPSVFPLAPSSKSTSGGTAALGCLVKDYFPEPVTVSWNSGALTSGVHTFPAVLQSSGLYSLESVVTVPSSSLGTQTYICNVNHKPSNTKVDKKVEPKSC

SEQ ID NO: 420 - protein, 211 aa, synthetic construct; identical to SEQ ID NO: 414
  REGION 1..211: note = source = /note="Description of Artificial Sequence: Synthetic polypeptide"

SEQ ID NO: 421 - DNA, 642 bp, synthetic construct; identical to SEQ ID NO: 326
  misc_feature 1..642: note = source = /note="Description of Artificial Sequence: Synthetic polynucleotide"
  source 1..642: mol_type = other DNA

SEQ ID NO: 422 - DNA, 2070 bp, synthetic construct
  misc_feature 1..2070: note = source = /note="Description of Artificial Sequence: Synthetic polynucleotide"
  source 1..2070: mol_type = other DNA
caggtacagttgcaggagtcaggtccaggactggtgaagccctcggagaccctctcactcacctgtaccatctccggggacagtgtctctaccaacagtgttgcttggaactggattaggaagcccccagggaaaggccttgagtggataggaaggacatactacaggtccaagtggtataatgattatgcagtttctctgaaaagtcgagtaaccatcagcccagacacatccaagaaccagttctccctgaagctgagctctgtgactgccgcggacacggctgtgtattactgtgcaagagaggatggggatagctactaccgctacggtatggacgtctggggccaagggaccacggtcaccgtctcctcaacggtggctgcaccatctgtcttcatcttcccgccatctgatgagcagttgaaatctggaactgcctctgttgtgtgcctgctgaataacttctatcccagagaggccaaagtacagtggaaggtggataacgccctccaatcgggtaactcccaggagagtgtcacagagcaggacagcaaggacagcacctacagcctcaagagcaccctgacgctgagcaaagcagactacgagaaacacaaagtctacgcctgcgaagtcacccatcagggcctgagctcgcccgtcacaaagagcttcaacaggggagagtgtgacaaaactcacacatgcccaccgtgcccagcacctgaactcctggggggaccgtcagtcttcctcttccccccaaaacccaaggacaccctcatgatctcccggacccctgaggtcacatgcgtggtggtggacgtgagccacgaagaccctgaggtcaagttcaactggtacgtggacggcgtggaggtgcataatgccaagacaaagccgtgtgaggagcagtacggcagcacgtaccgttgtgtcagcgtcctcaccgtcctgcaccaggactggctgaatggcaaggagtacaagtgcaaggtctccaacaaagccctcccagcccccatcgagaaaaccatctccaaagccaaagggcagccccgagaaccacaggtgtacaccctgcccccatcccgggaggagatgaccaagaaccaggtcagcctgacctgcctggtcaaaggcttctatcccagcgacatcgccgtggagtgggagagcaatgggcagccggagaacaactacaagaccacgcctcccgtgctggactccgacggctccttcttcctctatagcaagctcaccgtggacaagagcaggtggcagcaggggaacgtcttctcatgctccgtgatgcatgaggctctgcacaaccactacacgcagaagagcctctccctgtctccgggtggtggcggatcgggaggtggcggatccgaggtacaactggtggaatcaggtggaggtttggtgcagccggggagatcgctcaggcttagctgtgcggcatcggggtttactttcgatgattatgcgatgcattgggtccggaaagcgcctggaaaagggctcgagtgggtttccgccattacgtggaatagcggacacatcgattatgcagacagtgtggagggcagattcacaatctcacgagacaatgctaagaacagcctgtaccttcagatgaactcacttcgcgcggaagataccgccgtatactactgcgccaaagtctcctacttgtctacagcttcgtcgctcgactattggggtcaaggaacgttggtcaccgtctctagtgcctccaccaagggcccatcggtcttccccctggcaccctcctccaagagcacctctgggggcacagcggccctgggctgcctggtcaaggactacttccccgaaccggtgacggtgtcgtggaactcaggcgccctgaccagcggcgtgcacaccttcccggctgtcctacagtcctcaggactctactccctcgagagcgtggtgaccgtgccctccagcagcttgggcacccagacctacatctgcaacgtgaatcacaagcccagcaacaccaaggtggacaagaaagttgagcccaaatcttgt

SEQ ID NO: 423 - DNA, 651 bp, synthetic construct
  misc_feature 1..651: note = source = /note="Description of Artificial Sequence: Synthetic polynucleotide"
  source 1..651: mol_type = other DNA
gacatccagatgacccagtctccaagctccctgtctgcgtctgtgggcgatagggtcaccatcacttgcaggtccagccagagtgtgttatacagctccaacaataagaactacttagtttggtaccaggagaaaccaggaaaggttcctaaactgctcatttactgggcatctacccgggaatccggggtccctagtcgattcagtggcagcgggtctgggacagatttcactctcaccatcagcagcctgcagcctgaagatgtggcaacttattactgtcagcaatattataagactcctctcactttcggcggagggaccaaggtggagatcaaacgagcctccaccaagggcccatcggtcttccccctggcaccctcctccaagagcacctctgggggcacagcggccctgggctgcctggtcaaggactacttccccgaaccggtgacggtgtcgtggaactcaggcgccctgaccagcggcgtgcacaccttcccggctgtcctacagtcctcaggactctactccctcgaaagcgtggtgaccgtgccctccagcagcttgggcacccagacctacatctgcaacgtgaatcacaagcccagcaacaccaaggtggacaagaaagttgagcccaaatcttgt

SEQ ID NO: 424 - protein, 214 aa, synthetic construct; identical to SEQ ID NO: 329
  REGION 1..214: note = source = /note="Description of Artificial Sequence: Synthetic polypeptide"

SEQ ID NO: 425 - protein, 690 aa, synthetic construct
  REGION 1..690: note = source = /note="Description of Artificial Sequence: Synthetic polypeptide"
QVQLQESGPGLVKPSETLSLTCTISGDSVSTNSVAWNWIRKPPGKGLEWIGRTYYRSKWYNDYAVSLKSRVTISPDTSKNQFSLKLSSVTAADTAVYYCAREDGDSYYRYGMDVWGQGTTVTVSSTVAAPSVFIFPPSDEQLKSGTASVVCLLNNFYPREAKVQWKVDNALQSGNSQESVTEQDSKDSTYSLKSTLTLSKADYEKHKVYACEVTHQGLSSPVTKSFNRGECDKTHTCPPCPAPELLGGPSVFLFPPKPKDTLMISRTPEVTCVVVDVSHEDPEVKFNWYVDGVEVHNAKTKPCEEQYGSTYRCVSVLTVLHQDWLNGKEYKCKVSNKALPAPIEKTISKAKGQPREPQVYTLPPSREEMTKNQVSLTCLVKGFYPSDIAVEWESNGQPENNYKTTPPVLDSDGSFFLYSKLTVDKSRWQQGNVFSCSVMHEALHNHYTQKSLSLSPGGGGSGGGGSEVQLVESGGGLVQPGRSLRLSCAASGFTFDDYAMHWVRKAPGKGLEWVSAITWNSGHIDYADSVEGRFTISRDNAKNSLYLQMNSLRAEDTAVYYCAKVSYLSTASSLDYWGQGTLVTVSSASTKGPSVFPLAPSSKSTSGGTAALGCLVKDYFPEPVTVSWNSGALTSGVHTFPAVLQSSGLYSLESVVTVPSSSLGTQTYICNVNHKPSNTKVDKKVEPKSC

SEQ ID NO: 426 - protein, 217 aa, synthetic construct
  REGION 1..217: note = source = /note="Description of Artificial Sequence: Synthetic polypeptide"
DIQMTQSPSSLSASVGDRVTITCRSSQSVLYSSNNKNYLVWYQEKPGKVPKLLIYWASTRESGVPSRFSGSGSGTDFTLTISSLQPEDVATYYCQQYYKTPLTFGGGTKVEIKRASTKGPSVFPLAPSSKSTSGGTAALGCLVKDYFPEPVTVSWNSGALTSGVHTFPAVLQSSGLYSLESVVTVPSSSLGTQTYICNVNHKPSNTKVDKKVEPKSC

SEQ ID NO: 427 - DNA, 651 bp, synthetic construct; identical to SEQ ID NO: 332
  misc_feature 1..651: note = source = /note="Description of Artificial Sequence: Synthetic polynucleotide"
  source 1..651: mol_type = other DNA

SEQ ID NO: 428 - DNA, 2055 bp, synthetic construct
  misc_feature 1..2055: note = source = /note="Description of Artificial Sequence: Synthetic polynucleotide"
  source 1..2055: mol_type = other DNA
caggtacagttgcaggagtcaggtccaggactggtgaagccctcggagaccctctcactcacctgtaccatctccggggacagtgtctctaccaacagtgttgcttggaactggattaggaagcccccagggaaaggccttgagtggataggaaggacatactacaggtccaagtggtataatgattatgcagtttctctgaaaagtcgagtaaccatcagcccagacacatccaagaaccagttctccctgaagctgagctctgtgactgccgcggacacggctgtgtattactgtgcaagagaggatggggatagctactaccgctacggtatggacgtctggggccaagggaccacggtcaccgtctcctcaacggtggctgcaccatctgtcttcatcttcccgccatctgatgagcagttgaaatctggaactgcctctgttgtgtgcctgctgaataacttctatcccagagaggccaaagtacagtggaaggtggataacgccctccaatcgggtaactcccaggagagtgtcacagagcaggacagcaaggacagcacctacagcctcaagagcaccctgacgctgagcaaagcagactacgagaaacacaaagtctacgcctgcgaagtcacccatcagggcctgagctcgcccgtcacaaagagcttcaacaggggagagtgtgacaaaactcacacatgcccaccgtgcccagcacctgaactcctggggggaccgtcagtcttcctcttccccccaaaacccaaggacaccctcatgatctcccggacccctgaggtcacatgcgtggtggtggacgtgagccacgaagaccctgaggtcaagttcaactggtacgtggacggcgtggaggtgcataatgccaagacaaagccgtgtgaggagcagtacggcagcacgtaccgttgtgtcagcgtcctcaccgtcctgcaccaggactggctgaatggcaaggagtacaagtgcaaggtctccaacaaagccctcccagcccccatcgagaaaaccatctccaaagccaaagggcagccccgagaaccacaggtgtacaccctgcccccatcccgggaggagatgaccaagaaccaggtcagcctgacctgcctggtcaaaggcttctatcccagcgacatcgccgtggagtgggagagcaatgggcagccggagaacaactacaagaccacgcctcccgtgctggactccgacggctccttcttcctctatagcaagctcaccgtggacaagagcaggtggcagcaggggaacgtcttctcatgctccgtgatgcatgaggctctgcacaaccactacacgcagaagagcctctccctgtctccgggtggtggcggatcgggaggtggcggatccgaggtgcagctggtgcagtctggagcagaggtgaaaaagcccggggagtctctgaagatctcctgtaagacttctgaatacagctttaccagctactggatcggctgggtgcgcaagatgcccgggaaaggcctggagtggatggggatcatctatcttggtgactcagataccagatacagcccgtccttccaaggccaggtcaccatctcagccgacaagtccatcagtaccgcctacctgcagtggagcagcctgaaggcctcggacaccgccatgtattactgtgcgagaagtaactggggtcttgactactggggccagggaaccctggtcaccgtctctagtgcctccaccaagggcccatcggtcttccccctggcaccctcctccaagagcacctctgggggcacagcggccctgggctgcctggtcaaggactacttccccgaaccggtgacggtgtcgtggaactcaggcgccctgaccagcggcgtgcacaccttcccggctgtcctacagtcctcaggactctactccctcgagagcgtggtgaccgtgccctccagcagcttgggcacccagacctacatctgcaacgtgaatcacaagcccagcaacaccaaggtggacaagaaagttgagcccaaatcttgt

SEQ ID NO: 429 - DNA, 651 bp, synthetic construct; identical to SEQ ID NO: 423
  misc_feature 1..651: note = source = /note="Description of Artificial Sequence: Synthetic polynucleotide"
  source 1..651: mol_type = other DNA

SEQ ID NO: 430 - protein, 217 aa, synthetic construct; identical to SEQ ID NO: 335
  REGION 1..217: note = source = /note="Description of Artificial Sequence: Synthetic polypeptide"

SEQ ID NO: 431 - protein, 685 aa, synthetic construct
  REGION 1..685: note = source = /note="Description of Artificial Sequence: Synthetic polypeptide"
QVQLQESGPGLVKPSETLSLTCTISGDSVSTNSVAWNWIRKPPGKGLEWIGRTYYRSKWYNDYAVSLKSRVTISPDTSKNQFSLKLSSVTAADTAVYYCAREDGDSYYRYGMDVWGQGTTVTVSSTVAAPSVFIFPPSDEQLKSGTASVVCLLNNFYPREAKVQWKVDNALQSGNSQESVTEQDSKDSTYSLKSTLTLSKADYEKHKVYACEVTHQGLSSPVTKSFNRGECDKTHTCPPCPAPELLGGPSVFLFPPKPKDTLMISRTPEVTCVVVDVSHEDPEVKFNWYVDGVEVHNAKTKPCEEQYGSTYRCVSVLTVLHQDWLNGKEYKCKVSNKALPAPIEKTISKAKGQPREPQVYTLPPSREEMTKNQVSLTCLVKGFYPSDIAVEWESNGQPENNYKTTPPVLDSDGSFFLYSKLTVDKSRWQQGNVFSCSVMHEALHNHYTQKSLSLSPGGGGSGGGGSEVQLVQSGAEVKKPGESLKISCKTSEYSFTSYWIGWVRKMPGKGLEWMGIIYLGDSDTRYSPSFQGQVTISADKSISTAYLQWSSLKASDTAMYYCARSNWGLDYWGQGTLVTVSSASTKGPSVFPLAPSSKSTSGGTAALGCLVKDYFPEPVTVSWNSGALTSGVHTFPAVLQSSGLYSLESVVTVPSSSLGTQTYICNVNHKPSNTKVDKKVEPKSC

SEQ ID NO: 432 - protein, 217 aa, synthetic construct; identical to SEQ ID NO: 426
  REGION 1..217: note = source = /note="Description of Artificial Sequence: Synthetic polypeptide"

SEQ ID NO: 433 - DNA, 642 bp, synthetic construct; identical to SEQ ID NO: 289
  misc_feature 1..642: note = source = /note="Description of Artificial Sequence: Synthetic polynucleotide"
  source 1..642: mol_type = other DNA

SEQ ID NO: 434 - DNA, 2055 bp, synthetic construct
  misc_feature 1..2055: note = source = /note="Description of Artificial Sequence: Synthetic polynucleotide"
  source 1..2055: mol_type = other DNA
gaggtacaactggtggaatcaggtggaggtttggtgcagccggggagatcgctcaggcttagctgtgcggcatcggggtttactttcgatgattatgcgatgcattgggtccggaaagcgcctggaaaagggctcgagtgggtttccgccattacgtggaatagcggacacatcgattatgcagacagtgtggagggcagattcacaatctcacgagacaatgctaagaacagcctgtaccttcagatgaactcacttcgcgcggaagataccgccgtatactactgcgccaaagtctcctacttgtctacagcttcgtcgctcgactattggggtcaaggaacgttggtcaccgtctctagtgcctccaccaagggcccatcggtcttccccctggcaccctcctccaagagcacctctgggggcacagcggccctgggctgcctggtcaaggactacttccccgaaccggtgacggtgtcgtggaactcaggcgccctgaccagcggcgtgcacaccttcccggctgtcctacagtcctcaggactctactccctcaaaagcgtggtgaccgtgccctccagcagcttgggcacccagacctacatctgcaacgtgaatcacaagcccagcaacaccaaggtggacaagaaagttgagcccaaatcttgtgacaaaactcacacatgcccaccgtgcccagcacctgaactcctggggggaccgtcagtcttcctcttccccccaaaacccaaggacaccctcatgatctcccggacccctgaggtcacatgcgtggtggtggacgtgagccacgaagaccctgaggtcaagttcaactggtacgtggacggcgtggaggtgcataatgccaagacaaagccgtgtgaggagcagtacggcagcacgtaccgttgtgtcagcgtcctcaccgtcctgcaccaggactggctgaatggcaaggagtacaagtgcaaggtctccaacaaagccctcccagcccccatcgagaaaaccatctccaaagccaaagggcagccccgagaaccacaggtgtacaccctgcccccatcccgggaggagatgaccaagaaccaggtcagcctgacctgcctggtcaaaggcttctatcccagcgacatcgccgtggagtgggagagcaatgggcagccggagaacaactacaagaccacgcctcccgtgctggactccgacggctccttcttcctctatagcaagctcaccgtggacaagagcaggtggcagcaggggaacgtcttctcatgctccgtgatgcatgaggctctgcacaaccactacacgcagaagagcctctccctgtctccgggtggtggcggatcgggaggtggcggatcccaggtgcagttacagcagtcgggcgcaggactgttgaagccttcggagaccctgtccctcacctgcgctgtccatggtgggtccttcagtggttactactggaactggattcgcaagccaccagggaaggggctagagtggattggggaaatcaatcatgctggaaacaccaactacaacccgtccctcaagagtcgagtcaccatatcattagacacgtccaagaaccagttctccctgacgctgacctctgtgaccgccgcggacacggctgtgtattactgtgcgagaggatattgtagaagtaccacctgctactttgactactggggccagggaaccctagtcaccgtctcctcaactgtggctgcaccatctgtcttcatcttcccgccatctgatgagcagttgaaatctggaactgcctctgttgtgtgcctgctgaataacttctatcccagagaggccaaagtacagtggaaggtggataacgccctccaatcgggtaactcccaggagagtgtcacagagcaggacagcaaggacagcacctacagcctcgaaagcaccctgacgctgagcaaagcagactacgagaaacacaaagtctacgcctgcgaagtcacccatcagggcctgagctcgcccgtcacaaagagcttcaacaggggagagtgt

SEQ ID NO: 435 - DNA, 633 bp, synthetic construct
  misc_feature 1..633: note = source = /note="Description of Artificial Sequence: Synthetic polynucleotide"
  source 1..633: mol_type = other DNA
gaaattgtgttgacgcagtctccaggcaccctgtctttgtctccaggggaaagagccaccctctcctgcagggccagtcagagtgttagaagcagttacttagcctggtaccaggagaaacctggccaggctcccaggctcctcatctatggtgcatccagcagggccactggcatcccagacaggttcagtggcagtgggtctgggacagacttcactctcaccatcagcagactggagcctgaagattttgcagtgtattactgtcagcagtatggtagctcacctaccttcggccaagggacacgactggagattaaacgagcctccaccaagggcccatcggtcttccccctggcaccctcctccaagagcacctctgggggcacagcggccctgggctgcctggtcaaggactacttccccgaaccggtgacggtgtcgtggaactcaggcgccctgaccagcggcgtgcacaccttcccggctgtcctacagtcctcaggactctactccctcaaaagcgtggtgaccgtgccctccagcagcttgggcacccagacctacatctgcaacgtgaatcacaagcccagcaacaccaaggtggacaagaaagttgagcccaaatcttgt

SEQ ID NO: 436 - protein, 214 aa, synthetic construct; identical to SEQ ID NO: 292
  REGION 1..214: note = source = /note="Description of Artificial Sequence: Synthetic polypeptide"

SEQ ID NO: 437 - protein, 685 aa, synthetic construct
  REGION 1..685: note = source = /note="Description of Artificial Sequence: Synthetic polypeptide"
EVQLVESGGGLVQPGRSLRLSCAASGFTFDDYAMHWVRKAPGKGLEWVSAITWNSGHIDYADSVEGRFTISRDNAKNSLYLQMNSLRAEDTAVYYCAKVSYLSTASSLDYWGQGTLVTVSSASTKGPSVFPLAPSSKSTSGGTAALGCLVKDYFPEPVTVSWNSGALTSGVHTFPAVLQSSGLYSLKSVVTVPSSSLGTQTYICNVNHKPSNTKVDKKVEPKSCDKTHTCPPCPAPELLGGPSVFLFPPKPKDTLMISRTPEVTCVVVDVSHEDPEVKFNWYVDGVEVHNAKTKPCEEQYGSTYRCVSVLTVLHQDWLNGKEYKCKVSNKALPAPIEKTISKAKGQPREPQVYTLPPSREEMTKNQVSLTCLVKGFYPSDIAVEWESNGQPENNYKTTPPVLDSDGSFFLYSKLTVDKSRWQQGNVFSCSVMHEALHNHYTQKSLSLSPGGGGSGGGGSQVQLQQSGAGLLKPSETLSLTCAVHGGSFSGYYWNWIRKPPGKGLEWIGEINHAGNTNYNPSLKSRVTISLDTSKNQFSLTLTSVTAADTAVYYCARGYCRSTTCYFDYWGQGTLVTVSSTVAAPSVFIFPPSDEQLKSGTASVVCLLNNFYPREAKVQWKVDNALQSGNSQESVTEQDSKDSTYSLESTLTLSKADYEKHKVYACEVTHQGLSSPVTKSFNRGEC

SEQ ID NO: 438 - protein, 211 aa, synthetic construct
  REGION 1..211: note = source = /note="Description of Artificial Sequence: Synthetic polypeptide"
EIVLTQSPGTLSLSPGERATLSCRASQSVRSSYLAWYQEKPGQAPRLLIYGASSRATGIPDRFSGSGSGTDFTLTISRLEPEDFAVYYCQQYGSSPTFGQGTRLEIKRASTKGPSVFPLAPSSKSTSGGTAALGCLVKDYFPEPVTVSWNSGALTSGVHTFPAVLQSSGLYSLKSVVTVPSSSLGTQTYICNVNHKPSNTKVDKKVEPKSC

SEQ ID NO: 439 - DNA, 642 bp, synthetic construct; identical to SEQ ID NO: 289
  misc_feature 1..642: note = source = /note="Description of Artificial Sequence: Synthetic polynucleotide"
  source 1..642: mol_type = other DNA

SEQ ID NO: 440 - DNA, 2049 bp, synthetic construct
  misc_feature 1..2049: note = source = /note="Description of Artificial Sequence: Synthetic polynucleotide"
  source 1..2049: mol_type = other DNA
gaggtacaactggtggaatcaggtggaggtttggtgcagccggggagatcgctcaggcttagctgtgcggcatcggggtttactttcgatgattatgcgatgcattgggtccggaaagcgcctggaaaagggctcgagtgggtttccgccattacgtggaatagcggacacatcgattatgcagacagtgtggagggcagattcacaatctcacgagacaatgctaagaacagcctgtaccttcagatgaactcacttcgcgcggaagataccgccgtatactactgcgccaaagtctcctacttgtctacagcttcgtcgctcgactattggggtcaaggaacgttggtcaccgtctctagtgcctccaccaagggcccatcggtcttccccctggcaccctcctccaagagcacctctgggggcacagcggccctgggctgcctggtcaaggactacttccccgaaccggtgacggtgtcgtggaactcaggcgccctgaccagcggcgtgcacaccttcccggctgtcctacagtcctcaggactctactccctcaaaagcgtggtgaccgtgccctccagcagcttgggcacccagacctacatctgcaacgtgaatcacaagcccagcaacaccaaggtggacaagaaagttgagcccaaatcttgtgacaaaactcacacatgcccaccgtgcccagcacctgaactcctggggggaccgtcagtcttcctcttccccccaaaacccaaggacaccctcatgatctcccggacccctgaggtcacatgcgtggtggtggacgtgagccacgaagaccctgaggtcaagttcaactggtacgtggacggcgtggaggtgcataatgccaagacaaagccgtgtgaggagcagtacggcagcacgtaccgttgtgtcagcgtcctcaccgtcctgcaccaggactggctgaatggcaaggagtacaagtgcaaggtctccaacaaagccctcccagcccccatcgagaaaaccatctccaaagccaaagggcagccccgagaaccacaggtgtacaccctgcccccatcccgggaggagatgaccaagaaccaggtcagcctgacctgcctggtcaaaggcttctatcccagcgacatcgccgtggagtgggagagcaatgggcagccggagaacaactacaagaccacgcctcccgtgctggactccgacggctccttcttcctctatagcaagctcaccgtggacaagagcaggtggcagcaggggaacgtcttctcatgctccgtgatgcatgaggctctgcacaaccactacacgcagaagagcctctccctgtctccgggtggtggcggatcgggaggtggcggatcccaggtgcagctgcaggagtcgggcccaggactggtgaagccttcggagaccctgtccctcacctgcactgtctctggtggctccatcagtagttacttctggagctggattcggaagcccccaggtaagggactggagtggattggctatatctattacagtgggcagaccaaatacaacccctccctcaagagtcgagtcaccatatcaatagacacgtccaagaaccagttctccctgaagctgagctctgtgaccgctgcggacacggccgtgtattactgtgcgagagaaactgggagctactacggctttgactactggggccagggaaccctggtcaccgtctcctcaactgtggctgcaccatctgtcttcatcttcccgccatctgatgagcagttgaaatctggaactgcctctgttgtgtgcctgctgaataacttctatcccagagaggccaaagtacagtggaaggtggataacgccctccaatcgggtaactcccaggagagtgtcacagagcaggacagcaaggacagcacctacagcctcgaaagcaccctgacgctgagcaaagcagactacgagaaacacaaagtctacgcctgcgaagtcacccatcagggcctgagctcgcccgtcacaaagagcttcaacaggggagagtgt

SEQ ID NO: 441 - DNA, 633 bp, synthetic construct
  misc_feature 1..633: note = source = /note="Description of Artificial Sequence: Synthetic polynucleotide"
  source 1..633: mol_type = other DNA
gacatccagatgacccagtctccatcctccctgtctgcatctgtaggagacagagtcaccatcacttgccgggcaagtcagagcattaacaactatttaaattggtatcaggagagaccagggaaagcccctaagctcctgatctatgctgcatccagtttgcaaagtggggtcccatcaaggttcagtggcagtggatctgggacagatttcactctcaccatcagcagtctgcaacctgaagattttgcaacttactactgtcaacagagttacagtacccctcggacgttcggccaagggaccaagctggaaatcaaacgagcctccaccaagggcccatcggtcttccccctggcaccctcctccaagagcacctctgggggcacagcggccctgggctgcctggtcaaggactacttccccgaaccggtgacggtgtcgtggaactcaggcgccctgaccagcggcgtgcacaccttcccggctgtcctacagtcctcaggactctactccctcaaaagcgtggtgaccgtgccctccagcagcttgggcacccagacctacatctgcaacgtgaatcacaagcccagcaacaccaaggtggacaagaaagttgagcccaaatcttgt

SEQ ID NO: 442 - protein, 214 aa, synthetic construct; identical to SEQ ID NO: 292
  REGION 1..214: note = source = /note="Description of Artificial Sequence: Synthetic polypeptide"

SEQ ID NO: 443 - protein, 683 aa, synthetic construct
  REGION 1..683: note = source = /note="Description of Artificial Sequence: Synthetic polypeptide"
EVQLVESGGGLVQPGRSLRLSCAASGFTFDDYAMHWVRKAPGKGLEWVSAITWNSGHIDYADSVEGRFTISRDNAKNSLYLQMNSLRAEDTAVYYCAKVSYLSTASSLDYWGQGTLVTVSSASTKGPSVFPLAPSSKSTSGGTAALGCLVKDYFPEPVTVSWNSGALTSGVHTFPAVLQSSGLYSLKSVVTVPSSSLGTQTYICNVNHKPSNTKVDKKVEPKSCDKTHTCPPCPAPELLGGPSVFLFPPKPKDTLMISRTPEVTCVVVDVSHEDPEVKFNWYVDGVEVHNAKTKPCEEQYGSTYRCVSVLTVLHQDWLNGKEYKCKVSNKALPAPIEKTISKAKGQPREPQVYTLPPSREEMTKNQVSLTCLVKGFYPSDIAVEWESNGQPENNYKTTPPVLDSDGSFFLYSKLTVDKSRWQQGNVFSCSVMHEALHNHYTQKSLSLSPGGGGSGGGGSQVQLQESGPGLVKPSETLSLTCTVSGGSISSYFWSWIRKPPGKGLEWIGYIYYSGQTKYNPSLKSRVTISIDTSKNQFSLKLSSVTAADTAVYYCARETGSYYGFDYWGQGTLVTVSSTVAAPSVFIFPPSDEQLKSGTASVVCLLNNFYPREAKVQWKVDNALQSGNSQESVTEQDSKDSTYSLESTLTLSKADYEKHKVYACEVTHQGLSSPVTKSFNRGEC

SEQ ID NO: 444 - protein, 211 aa, synthetic construct
  REGION 1..211: note = source = /note="Description of Artificial Sequence: Synthetic polypeptide"
DIQMTQSPSSLSASVGDRVTITCRASQSINNYLNWYQERPGKAPKLLIYAASSLQSGVPSRFSGSGSGTDFTLTISSLQPEDFATYYCQQSYSTPRTFGQGTKLEIKRASTKGPSVFPLAPSSKSTSGGTAALGCLVKDYFPEPVTVSWNSGALTSGVHTFPAVLQSSGLYSLKSVVTVPSSSLGTQTYICNVNHKPSNTKVDKKVEPKSC

SEQ ID NO: 445 - DNA, 642 bp, synthetic construct; identical to SEQ ID NO: 289
  misc_feature 1..642: note = source = /note="Description of Artificial Sequence: Synthetic polynucleotide"
  source 1..642: mol_type = other DNA

SEQ ID NO: 446 - DNA, 2070 bp, synthetic construct
  misc_feature 1..2070: note = source = /note="Description of Artificial Sequence: Synthetic polynucleotide"
  source 1..2070: mol_type = other DNA
gaggtacaactggtggaatcaggtggaggtttggtgcagccggggagatcgctcaggcttagctgtgcggcatcggggtttactttcgatgattatgcgatgcattgggtccggaaagcgcctggaaaagggctcgagtgggtttccgccattacgtggaatagcggacacatcgattatgcagacagtgtggagggcagattcacaatctcacgagacaatgctaagaacagcctgtaccttcagatgaactcacttcgcgcggaagataccgccgtatactactgcgccaaagtctcctacttgtctacagcttcgtcgctcgactattggggtcaaggaacgttggtcaccgtctctagtgcctccaccaagggcccatcggtcttccccctggcaccctcctccaagagcacctctgggggcacagcggccctgggctgcctggtcaaggactacttccccgaaccggtgacggtgtcgtggaactcaggcgccctgaccagcggcgtgcacaccttcccggctgtcctacagtcctcaggactctactccctcaaaagcgtggtgaccgtgccctccagcagcttgggcacccagacctacatctgcaacgtgaatcacaagcccagcaacaccaaggtggacaagaaagttgagcccaaatcttgtgacaaaactcacacatgcccaccgtgcccagcacctgaactcctggggggaccgtcagtcttcctcttccccccaaaacccaaggacaccctcatgatctcccggacccctgaggtcacatgcgtggtggtggacgtgagccacgaagaccctgaggtcaagttcaactggtacgtggacggcgtggaggtgcataatgccaagacaaagccgtgtgaggagcagtacggcagcacgtaccgttgtgtcagcgtcctcaccgtcctgcaccaggactggctgaatggcaaggagtacaagtgcaaggtctccaacaaagccctcccagcccccatcgagaaaaccatctccaaagccaaagggcagccccgagaaccacaggtgtacaccctgcccccatcccgggaggagatgaccaagaaccaggtcagcctgacctgcctggtcaaaggcttctatcccagcgacatcgccgtggagtgggagagcaatgggcagccggagaacaactacaagaccacgcctcccgtgctggactccgacggctccttcttcctctatagcaagctcaccgtggacaagagcaggtggcagcaggggaacgtcttctcatgctccgtgatgcatgaggctctgcacaaccactacacgcagaagagcctctccctgtctccgggtggtggcggatcgggaggtggcggatcccaggtacagttgcaggagtcaggtccaggactggtgaagccctcggagaccctctcactcacctgtaccatctccggggacagtgtctctaccaacagtgttgcttggaactggattaggaagcccccagggaaaggccttgagtggataggaaggacatactacaggtccaagtggtataatgattatgcagtttctctgaaaagtcgagtaaccatcagcccagacacatccaagaaccagttctccctgaagctgagctctgtgactgccgcggacacggctgtgtattactgtgcaagagaggatggggatagctactaccgctacggtatggacgtctggggccaagggaccacggtcaccgtctcctcaactgtggctgcaccatctgtcttcatcttcccgccatctgatgagcagttgaaatctggaactgcctctgttgtgtgcctgctgaataacttctatcccagagaggccaaagtacagtggaaggtggataacgccctccaatcgggtaactcccaggagagtgtcacagagcaggacagcaaggacagcacctacagcctcgaaagcaccctgacgctgagcaaagcagactacgagaaacacaaagtctacgcctgcgaagtcacccatcagggcctgagctcgcccgtcacaaagagcttcaacaggggagagtgt

SEQ ID NO: 447 - DNA, 651 bp, synthetic construct
  misc_feature 1..651: note = source = /note="Description of Artificial Sequence: Synthetic polynucleotide"
  source 1..651: mol_type = other DNA
gacatccagatgacccagtctccaagctccctgtctgcgtctgtgggcgatagggtcaccatcacttgcaggtccagccagagtgtgttatacagctccaacaataagaactacttagtttggtaccaggagaaaccaggaaaggttcctaaactgctcatttactgggcatctacccgggaatccggggtccctagtcgattcagtggcagcgggtctgggacagatttcactctcaccatcagcagcctgcagcctgaagatgtggcaacttattactgtcagcaatattataagactcctctcactttcggcggagggaccaaggtggagatcaaacgagcctccaccaagggcccatcggtcttccccctggcaccctcctccaagagcacctctgggggcacagcggccctgggctgcctggtcaaggactacttccccgaaccggtgacggtgtcgtggaactcaggcgccctgaccagcggcgtgcacaccttcccggctgtcctacagtcctcaggactctactccctcaaaagcgtggtgaccgtgccctccagcagcttgggcacccagacctacatctgcaacgtgaatcacaagcccagcaacaccaaggtggacaagaaagttgagcccaaatcttgt

SEQ ID NO: 448 - protein, 214 aa, synthetic construct; identical to SEQ ID NO: 292
  REGION 1..214: note = source = /note="Description of Artificial Sequence: Synthetic polypeptide"

SEQ ID NO: 449 - protein, 690 aa, synthetic construct
  REGION 1..690: note = source = /note="Description of Artificial Sequence: Synthetic polypeptide"
EVQLVESGGGLVQPGRSLRLSCAASGFTFDDYAMHWVRKAPGKGLEWVSAITWNSGHIDYADSVEGRFTISRDNAKNSLYLQMNSLRAEDTAVYYCAKVSYLSTASSLDYWGQGTLVTVSSASTKGPSVFPLAPSSKSTSGGTAALGCLVKDYFPEPVTVSWNSGALTSGVHTFPAVLQSSGLYSLKSVVTVPSSSLGTQTYICNVNHKPSNTKVDKKVEPKSCDKTHTCPPCPAPELLGGPSVFLFPPKPKDTLMISRTPEVTCVVVDVSHEDPEVKFNWYVDGVEVHNAKTKPCEEQYGSTYRCVSVLTVLHQDWLNGKEYKCKVSNKALPAPIEKTISKAKGQPREPQVYTLPPSREEMTKNQVSLTCLVKGFYPSDIAVEWESNGQPENNYKTTPPVLDSDGSFFLYSKLTVDKSRWQQGNVFSCSVMHEALHNHYTQKSLSLSPGGGGSGGGGSQVQLQESGPGLVKPSETLSLTCTISGDSVSTNSVAWNWIRKPPGKGLEWIGRTYYRSKWYNDYAVSLKSRVTISPDTSKNQFSLKLSSVTAADTAVYYCAREDGDSYYRYGMDVWGQGTTVTVSSTVAAPSVFIFPPSDEQLKSGTASVVCLLNNFYPREAKVQWKVDNALQSGNSQESVTEQDSKDSTYSLESTLTLSKADYEKHKVYACEVTHQGLSSPVTKSFNRGEC

SEQ ID NO: 450 - protein, 217 aa, synthetic construct
  REGION 1..217: note = source = /note="Description of Artificial Sequence: Synthetic polypeptide"
DIQMTQSPSSLSASVGDRVTITCRSSQSVLYSSNNKNYLVWYQEKPGKVPKLLIYWASTRESGVPSRFSGSGSGTDFTLTISSLQPEDVATYYCQQYYKTPLTFGGGTKVEIKRASTKGPSVFPLAPSSKSTSGGTAALGCLVKDYFPEPVTVSWNSGALTSGVHTFPAVLQSSGLYSLKSVVTVPSSSLGTQTYICNVNHKPSNTKVDKKVEPKSC

SEQ ID NO: 451 - DNA, 651 bp, synthetic construct; identical to SEQ ID NO: 307
  misc_feature 1..651: note = source = /note="Description of Artificial Sequence: Synthetic polynucleotide"
  source 1..651: mol_type = other DNA

SEQ ID NO: 452 - DNA, 2040 bp, synthetic construct
  misc_feature 1..2040: note = source = /note="Description of Artificial Sequence: Synthetic polynucleotide"
  source 1..2040: mol_type = other DNA
gaggtgcagctggtgcagtctggagcagaggtgaaaaagcccggggagtctctgaagatctcctgtaagacttctgaatacagctttaccagctactggatcggctgggtgcgcaagatgcccgggaaaggcctggagtggatggggatcatctatcttggtgactcagataccagatacagcccgtccttccaaggccaggtcaccatctcagccgacaagtccatcagtaccgcctacctgcagtggagcagcctgaaggcctcggacaccgccatgtattactgtgcgagaagtaactggggtcttgactactggggccagggaaccctggtcaccgtctctagtgcctccaccaagggcccatcggtcttccccctggcaccctcctccaagagcacctctgggggcacagcggccctgggctgcctggtcaaggactacttccccgaaccggtgacggtgtcgtggaactcaggcgccctgaccagcggcgtgcacaccttcccggctgtcctacagtcctcaggactctactccctcaaaagcgtggtgaccgtgccctccagcagcttgggcacccagacctacatctgcaacgtgaatcacaagcccagcaacaccaaggtggacaagaaagttgagcccaaatcttgtgacaaaactcacacatgcccaccgtgcccagcacctgaactcctggggggaccgtcagtcttcctcttccccccaaaacccaaggacaccctcatgatctcccggacccctgaggtcacatgcgtggtggtggacgtgagccacgaagaccctgaggtcaagttcaactggtacgtggacggcgtggaggtgcataatgccaagacaaagccgtgtgaggagcagtacggcagcacgtaccgttgtgtcagcgtcctcaccgtcctgcaccaggactggctgaatggcaaggagtacaagtgcaaggtctccaacaaagccctcccagcccccatcgagaaaaccatctccaaagccaaagggcagccccgagaaccacaggtgtacaccctgcccccatcccgggaggagatgaccaagaaccaggtcagcctgacctgcctggtcaaaggcttctatcccagcgacatcgccgtggagtgggagagcaatgggcagccggagaacaactacaagaccacgcctcccgtgctggactccgacggctccttcttcctctatagcaagctcaccgtggacaagagcaggtggcagcaggggaacgtcttctcatgctccgtgatgcatgaggctctgcacaaccactacacgcagaagagcctctccctgtctccgggtggtggcggatcgggaggtggcggatcccaggtgcagttacagcagtcgggcgcaggactgttgaagccttcggagaccctgtccctcacctgcgctgtccatggtgggtccttcagtggttactactggaactggattcgcaagccaccagggaaggggctagagtggattggggaaatcaatcatgctggaaacaccaactacaacccgtccctcaagagtcgagtcaccatatcattagacacgtccaagaaccagttctccctgacgctgacctctgtgaccgccgcggacacggctgtgtattactgtgcgagaggatattgtagaagtaccacctgctactttgactactggggccagggaaccctagtcaccgtctcctcaactgtggctgcaccatctgtcttcatcttcccgccatctgatgagcagttgaaatctggaactgcctctgttgtgtgcctgctgaataacttctatcccagagaggccaaagtacagtggaaggtggataacgccctccaatcgggtaactcccaggagagtgtcacagagcaggacagcaaggacagcacctacagcctcgaaagcaccctgacgctgagcaaagcagactacgagaaacacaaagtctacgcctgcgaagtcacccatcagggcctgagctcgcccgtcacaaagagcttcaacaggggagagtgt

SEQ ID NO: 453 - DNA, 633 bp, synthetic construct; identical to SEQ ID NO: 435
  misc_feature 1..633: note = source = /note="Description of Artificial Sequence: Synthetic polynucleotide"
  source 1..633: mol_type = other DNA

SEQ ID NO: 454 - protein, 217 aa, synthetic construct; identical to SEQ ID NO: 310
  REGION 1..217: note = source = /note="Description of Artificial Sequence: Synthetic polypeptide"

SEQ ID NO: 455 - protein, 680 aa, synthetic construct
  REGION 1..680: note = source = /note="Description of Artificial Sequence: Synthetic polypeptide"
EVQLVQSGAEVKKPGESLKISCKTSEYSFTSYWIGWVRKMPGKGLEWMGIIYLGDSDTRYSPSFQGQVTISADKSISTAYLQWSSLKASDTAMYYCARSNWGLDYWGQGTLVTVSSASTKGPSVFPLAPSSKSTSGGTAALGCLVKDYFPEPVTVSWNSGALTSGVHTFPAVLQSSGLYSLKSVVTVPSSSLGTQTYICNVNHKPSNTKVDKKVEPKSCDKTHTCPPCPAPELLGGPSVFLFPPKPKDTLMISRTPEVTCVVVDVSHEDPEVKFNWYVDGVEVHNAKTKPCEEQYGSTYRCVSVLTVLHQDWLNGKEYKCKVSNKALPAPIEKTISKAKGQPREPQVYTLPPSREEMTKNQVSLTCLVKGFYPSDIAVEWESNGQPENNYKTTPPVLDSDGSFFLYSKLTVDKSRWQQGNVFSCSVMHEALHNHYTQKSLSLSPGGGGSGGGGSQVQLQQSGAGLLKPSETLSLTCAVHGGSFSGYYWNWIRKPPGKGLEWIGEINHAGNTNYNPSLKSRVTISLDTSKNQFSLTLTSVTAADTAVYYCARGYCRSTTCYFDYWGQGTLVTVSSTVAAPSVFIFPPSDEQLKSGTASVVCLLNNFYPREAKVQWKVDNALQSGNSQESVTEQDSKDSTYSLESTLTLSKADYEKHKVYACEVTHQGLSSPVTKSFNRGEC

SEQ ID NO: 456 - protein, 211 aa, synthetic construct; identical to SEQ ID NO: 438
  REGION 1..211: note = source = /note="Description of Artificial Sequence: Synthetic polypeptide"

SEQ ID NO: 457 - DNA, 651 bp, synthetic construct; identical to SEQ ID NO: 307
  misc_feature 1..651: note = source = /note="Description of Artificial Sequence: Synthetic polynucleotide"
  source 1..651: mol_type = other DNA

SEQ ID NO: 458 - DNA, 2034 bp, synthetic construct
  misc_feature 1..2034: note = source = /note="Description of Artificial Sequence: Synthetic polynucleotide"
  source 1..2034: mol_type = other DNA
gaggtgcagctggtgcagtctggagcagaggtgaaaaagcccggggagtctctgaagatctcctgtaagacttctgaatacagctttaccagctactggatcggctgggtgcgcaagatgcccgggaaaggcctggagtggatggggatcatctatcttggtgactcagataccagatacagcccgtccttccaaggccaggtcaccatctcagccgacaagtccatcagtaccgcctacctgcagtggagcagcctgaaggcctcggacaccgccatgtattactgtgcgagaagtaactggggtcttgactactggggccagggaaccctggtcaccgtctctagtgcctccaccaagggcccatcggtcttccccctggcaccctcctccaagagcacctctgggggcacagcggccctgggctgcctggtcaaggactacttccccgaaccggtgacggtgtcgtggaactcaggcgccctgaccagcggcgtgcacaccttcccggctgtcctacagtcctcaggactctactccctcaaaagcgtggtgaccgtgccctccagcagcttgggcacccagacctacatctgcaacgtgaatcacaagcccagcaacaccaaggtggacaagaaagttgagcccaaatcttgtgacaaaactcacacatgcccaccgtgcccagcacctgaactcctggggggaccgtcagtcttcctcttccccccaaaacccaaggacaccctcatgatctcccggacccctgaggtcacatgcgtggtggtggacgtgagccacgaagaccctgaggtcaagttcaactggtacgtggacggcgtggaggtgcataatgccaagacaaagccgtgtgaggagcagtacggcagcacgtaccgttgtgtcagcgtcctcaccgtcctgcaccaggactggctgaatggcaaggagtacaagtgcaaggtctccaacaaagccctcccagcccccatcgagaaaaccatctccaaagccaaagggcagccccgagaaccacaggtgtacaccctgcccccatcccgggaggagatgaccaagaaccaggtcagcctgacctgcctggtcaaaggcttctatcccagcgacatcgccgtggagtgggagagcaatgggcagccggagaacaactacaagaccacgcctcccgtgctggactccgacggctccttcttcctctatagcaagctcaccgtggacaagagcaggtggcagcaggggaacgtcttctcatgctccgtgatgcatgaggctctgcacaaccactacacgcagaagagcctctccctgtctccgggtggtggcggatcgggaggtggcggatcccaggtgcagctgcaggagtcgggcccaggactggtgaagccttcggagaccctgtccctcacctgcactgtctctggtggctccatcagtagttacttctggagctggattcggaagcccccaggtaagggactggagtggattggctatatctattacagtgggcagaccaaatacaacccctccctcaagagtcgagtcaccatatcaatagacacgtccaagaaccagttctccctgaagctgagctctgtgaccgctgcggacacggccgtgtattactgtgcgagagaaactgggagctactacggctttgactactggggccagggaaccctggtcaccgtctcctcaactgtggctgcaccatctgtcttcatcttcccgccatctgatgagcagttgaaatctggaactgcctctgttgtgtgcctgctgaataacttctatcccagagaggccaaagtacagtggaaggtggataacgccctccaatcgggtaactcccaggagagtgtcacagagcaggacagcaaggacagcacctacagcctcgaaagcaccctgacgctgagcaaagcagactacgagaaacacaaagtctacgcctgcgaagtcacccatcagggcctgagctcgcccgtcacaaagagcttcaacaggggagagtgt

SEQ ID NO: 459 - DNA, 633 bp, synthetic construct; identical to SEQ ID NO: 441
  misc_feature 1..633: note = source = /note="Description of Artificial Sequence: Synthetic polynucleotide"
  source 1..633: mol_type = other DNA

SEQ ID NO: 460 - protein, 217 aa, synthetic construct; identical to SEQ ID NO: 310
  REGION 1..217: note = source = /note="Description of Artificial Sequence: Synthetic polypeptide"

SEQ ID NO: 461 - protein, 678 aa, synthetic construct
  REGION 1..678: note = source = /note="Description of Artificial Sequence: Synthetic polypeptide"
EVQLVQSGAEVKKPGESLKISCKTSEYSFTSYWIGWVRKMPGKGLEWMGIIYLGDSDTRYSPSFQGQVTISADKSISTAYLQWSSLKASDTAMYYCARSNWGLDYWGQGTLVTVSSASTKGPSVFPLAPSSKSTSGGTAALGCLVKDYFPEPVTVSWNSGALTSGVHTFPAVLQSSGLYSLKSVVTVPSSSLGTQTYICNVNHKPSNTKVDKKVEPKSCDKTHTCPPCPAPELLGGPSVFLFPPKPKDTLMISRTPEVTCVVVDVSHEDPEVKFNWYVDGVEVHNAKTKPCEEQYGSTYRCVSVLTVLHQDWLNGKEYKCKVSNKALPAPIEKTISKAKGQPREPQVYTLPPSREEMTKNQVSLTCLVKGFYPSDIAVEWESNGQPENNYKTTPPVLDSDGSFFLYSKLTVDKSRWQQGNVFSCSVMHEALHNHYTQKSLSLSPGGGGSGGGGSQVQLQESGPGLVKPSETLSLTCTVSGGSISSYFWSWIRKPPGKGLEWIGYIYYSGQTKYNPSLKSRVTISIDTSKNQFSLKLSSVTAADTAVYYCARETGSYYGFDYWGQGTLVTVSSTVAAPSVFIFPPSDEQLKSGTASVVCLLNNFYPREAKVQWKVDNALQSGNSQESVTEQDSKDSTYSLESTLTLSKADYEKHKVYACEVTHQGLSSPVTKSFNRGEC

SEQ ID NO: 462 - protein, 211 aa, synthetic construct; identical to SEQ ID NO: 444
  REGION 1..211: note = source = /note="Description of Artificial Sequence: Synthetic polypeptide"

SEQ ID NO: 463 - DNA, 651 bp, synthetic construct; identical to SEQ ID NO: 307
  misc_feature 1..651: note = source = /note="Description of Artificial Sequence: Synthetic polynucleotide"
  source 1..651: mol_type = other DNA

SEQ ID NO: 464 - DNA, 2055 bp, synthetic construct
  misc_feature 1..2055: note = source = /note="Description of Artificial Sequence: Synthetic polynucleotide"
  source 1..2055: mol_type = other DNA
gaggtgcagctggtgcagtctggagcagaggtgaaaaagcccggggagtctctgaagatctcctgtaagacttctgaatacagctttaccagctactggatcggctgggtgcgcaagatgcccgggaaaggcctggagtggatggggatcatctatcttggtgactcagataccagatacagcccgtccttccaaggccaggtcaccatctcagccgacaagtccatcagtaccgcctacctgcagtggagcagcctgaaggcctcggacaccgccatgtattactgtgcgagaagtaactggggtcttgactactggggccagggaaccctggtcaccgtctctagtgcctccaccaagggcccatcggtcttccccctggcaccctcctccaagagcacctctgggggcacagcggccctgggctgcctggtcaaggactacttccccgaaccggtgacggtgtcgtggaactcaggcgccctgaccagcggcgtgcacaccttcccggctgtcctacagtcctcaggactctactccctcaaaagcgtggtgaccgtgccctccagcagcttgggcacccagacctacatctgcaacgtgaatcacaagcccagcaacaccaaggtggacaagaaagttgagcccaaatcttgtgacaaaactcacacatgcccaccgtgcccagcacctgaactcctggggggaccgtcagtcttcctcttccccccaaaacccaaggacaccctcatgatctcccggacccctgaggtcacatgcgtggtggtggacgtgagccacgaagaccctgaggtcaagttcaactggtacgtggacggcgtggaggtgcataatgccaagacaaagccgtgtgaggagcagtacggcagcacgtaccgttgtgtcagcgtcctcaccgtcctgcaccaggactggctgaatggcaaggagtacaagtgcaaggtctccaacaaagccctcccagcccccatcgagaaaaccatctccaaagccaaagggcagccccgagaaccacaggtgtacaccctgcccccatcccgggaggagatgaccaagaaccaggtcagcctgacctgcctggtcaaaggcttctatcccagcgacatcgccgtggagtgggagagcaatgggcagccggagaacaactacaagaccacgcctcccgtgctggactccgacggctccttcttcctctatagcaagctcaccgtggacaagagcaggtggcagcaggggaacgtcttctcatgctccgtgatgcatgaggctctgcacaaccactacacgcagaagagcctctccctgtctccgggtggtggcggatcgggaggtggcggatcccaggtacagttgcaggagtcaggtccaggactggtgaagccctcggagaccctctcactcacctgtaccatctccggggacagtgtctctaccaacagtgttgcttggaactggattaggaagcccccagggaaaggccttgagtggataggaaggacatactacaggtccaagtggtataatgattatgcagtttctctgaaaagtcgagtaaccatcagcccagacacatccaagaaccagttctccctgaagctgagctctgtgactgccgcggacacggctgtgtattactgtgcaagagaggatggggatagctactaccgctacggtatggacgtctggggccaagggaccacggtcaccgtctcctcaactgtggctgcaccatctgtcttcatcttcccgccatctgatgagcagttgaaatctggaactgcctctgttgtgtgcctgctgaataacttctatcccagagaggccaaagtacagtggaaggtggataacgccctccaatcgggtaactcccaggagagtgtcacagagcaggacagcaaggacagcacctacagcctcgaaagcaccctgacgctgagcaaagcagactacgagaaacacaaagtctacgcctgcgaagtcacccatcagggcctgagctcgcccgtcacaaagagcttcaacaggggagagtgt

SEQ ID NO: 465 - DNA, 651 bp, synthetic construct; identical to SEQ ID NO: 447
  misc_feature 1..651: note = source = /note="Description of Artificial Sequence: Synthetic polynucleotide"
  source 1..651: mol_type = other DNA

SEQ ID NO: 466 - protein, 217 aa, synthetic construct; identical to SEQ ID NO: 310
  REGION 1..217: note = source = /note="Description of Artificial Sequence: Synthetic polypeptide"

SEQ ID NO: 467 - protein, 685 aa, synthetic construct
  REGION 1..685: note = source = /note="Description of Artificial Sequence: Synthetic polypeptide"
EVQLVQSGAEVKKPGESLKISCKTSEYSFTSYWIGWVRKMPGKGLEWMGIIYLGDSDTRYSPSFQGQVTISADKSISTAYLQWSSLKASDTAMYYCARSNWGLDYWGQGTLVTVSSASTKGPSVFPLAPSSKSTSGGTAALGCLVKDYFPEPVTVSWNSGALTSGVHTFPAVLQSSGLYSLKSVVTVPSSSLGTQTYICNVNHKPSNTKVDKKVEPKSCDKTHTCPPCPAPELLGGPSVFLFPPKPKDTLMISRTPEVTCVVVDVSHEDPEVKFNWYVDGVEVHNAKTKPCEEQYGSTYRCVSVLTVLHQDWLNGKEYKCKVSNKALPAPIEKTISKAKGQPREPQVYTLPPSREEMTKNQVSLTCLVKGFYPSDIAVEWESNGQPENNYKTTPPVLDSDGSFFLYSKLTVDKSRWQQGNVFSCSVMHEALHNHYTQKSLSLSPGGGGSGGGGSQVQLQESGPGLVKPSETLSLTCTISGDSVSTNSVAWNWIRKPPGKGLEWIGRTYYRSKWYNDYAVSLKSRVTISPDTSKNQFSLKLSSVTAADTAVYYCAREDGDSYYRYGMDVWGQGTTVTVSSTVAAPSVFIFPPSDEQLKSGTASVVCLLNNFYPREAKVQWKVDNALQSGNSQESVTEQDSKDSTYSLESTLTLSKADYEKHKVYACEVTHQGLSSPVTKSFNRGEC

SEQ ID NO: 468 - protein, 217 aa, synthetic construct; identical to SEQ ID NO: 450
  REGION 1..217: note = source = /note="Description of Artificial Sequence: Synthetic polypeptide"

SEQ ID NO: 469 - DNA, 642 bp, synthetic construct; identical to SEQ ID NO: 325
  misc_feature 1..642: note = source = /note="Description of Artificial Sequence: Synthetic polynucleotide"
  source 1..642: mol_type = other DNA

SEQ ID NO: 470 - DNA, 2055 bp, synthetic construct
  misc_feature 1..2055: note = source = /note="Description of Artificial Sequence: Synthetic polynucleotide"
  source 1..2055: mol_type = other DNA
caggtgcagttacagcagtcgggcgcaggactgttgaagccttcggagaccctgtccctcacctgcgctgtccatggtgggtccttcagtggttactactggaactggatccgcaagccaccagggaaggggctagagtggattggggaaatcaatcatgctggaaacaccaactacaacccgtccctcaagagtcgagtcaccatatcattagacacgtccaagaaccagttctccctgacgctgacctctgtgaccgccgcggacacggctgtgtattactgtgcgagaggatattgtagaagtaccacctgctactttgactactggggccagggaaccctagtcaccgtctcctcagcctccaccaagggcccatcggtcttccccctggcaccctcctccaagagcacctctgggggcacagcggccctgggctgcctggtcaaggactacttccccgaaccggtgacggtgtcgtggaactcaggcgccctgaccagcggcgtgcacaccttcccggctgtcctacagtcctcaggactctactccctcaaaagcgtggtgaccgtgccctccagcagcttgggcacccagacctacatctgcaacgtgaatcacaagcccagcaacaccaaggtggacaagaaagttgagcccaaatcttgtgacaaaactcacacatgcccaccgtgcccagcacctgaactcctggggggaccgtcagtcttcctcttccccccaaaacccaaggacaccctcatgatctcccggacccctgaggtcacatgcgtggtggtggacgtgagccacgaagaccctgaggtcaagttcaactggtacgtggacggcgtggaggtgcataatgccaagacaaagccgtgtgaggagcagtacggcagcacgtaccgttgtgtcagcgtcctcaccgtcctgcaccaggactggctgaatggcaaggagtacaagtgcaaggtctccaacaaagccctcccagcccccatcgagaaaaccatctccaaagccaaagggcagccccgagaaccacaggtgtacaccctgcccccatcccgggaggagatgaccaagaaccaggtcagcctgacctgcctggtcaaaggcttctatcccagcgacatcgccgtggagtgggagagcaatgggcagccggagaacaactacaagaccacgcctcccgtgctggactccgacggctccttcttcctctatagcaagctcaccgtggacaagagcaggtggcagcaggggaacgtcttctcatgctccgtgatgcatgaggctctgcacaaccactacacgcagaagagcctctccctgtctccgggtggtggcggatcgggaggtggcggatccgaggtacaactggtggaatcaggtggaggtttggtgcagccggggagatcgctcaggcttagctgtgcggcatcggggtttactttcgatgattatgcgatgcattgggtccggaaagcgcctggaaaagggctcgagtgggtttccgccattacgtggaatagcggacacatcgattatgcagacagtgtggagggcagattcacaatctcacgagacaatgctaagaacagcctgtaccttcagatgaactcacttcgcgcggaagataccgccgtatactactgcgccaaagtctcctacttgtctacagcttcgtcgctcgactattggggtcaaggaacgttggtcaccgtctctagtactgtggctgcaccatctgtcttcatcttcccgccatctgatgagcagttgaaatctggaactgcctctgttgtgtgcctgctgaataacttctatcccagagaggccaaagtacagtggaaggtggataacgccctccaatcgggtaactcccaggagagtgtcacagagcaggacagcaaggacagcacctacagcctcgaaagcaccctgacgctgagcaaagcagactacgagaaacacaaagtctacgcctgcgaagtcacccatcagggcctgagctcgcccgtcacaaagagcttcaacaggggagagtgt

SEQ ID NO: 471 - DNA, 633 bp, synthetic construct
  misc_feature 1..633: note = source = /note="Description of Artificial Sequence: Synthetic polynucleotide"
  source 1..633: mol_type = other DNA
gatatccaaatgacacaatcaccatcgtcgctttcagcgtctgttggcgaccgtgtgacgattacctgtcgcgcgtcccagggaatccggaattacctcgcatggtatcaggaaaaacccggaaaagcaccgaagctcctgatctatgccgcctcgactcttcagagtggtgtgccgtcgaggtttagcgggtccgggtcaggtacggactttactctcacaatttccagcctgcagcccgaagatgtagctacctattactgccagagatacaaccgagcgccttacacattcggacaagggacaaaagtcgagatcaagcgtgcctccaccaagggcccatcggtcttccccctggcaccctcctccaagagcacctctgggggcacagcggccctgggctgcctggtcaaggactacttccccgaaccggtgacggtgtcgtggaactcaggcgccctgaccagcggcgtgcacaccttcccggctgtcctacagtcctcaggactctactccctcaaaagcgtggtgaccgtgccctccagcagcttgggcacccagacctacatctgcaacgtgaatcacaagcccagcaacaccaaggtggacaagaaagttgagcccaaatcttgt

SEQ ID NO: 472 - protein, 214 aa, synthetic construct; identical to SEQ ID NO: 328
  REGION 1..214: note = source = /note="Description of Artificial Sequence: Synthetic polypeptide"

SEQ ID NO: 473 - protein, 685 aa, synthetic construct
  REGION 1..685: note = source = /note="Description of Artificial Sequence: Synthetic polypeptide"
QVQLQQSGAGLLKPSETLSLTCAVHGGSFSGYYWNWIRKPPGKGLEWIGEINHAGNTNYNPSLKSRVTISLDTSKNQFSLTLTSVTAADTAVYYCARGYCRSTTCYFDYWGQGTLVTVSSASTKGPSVFPLAPSSKSTSGGTAALGCLVKDYFPEPVTVSWNSGALTSGVHTFPAVLQSSGLYSLKSVVTVPSSSLGTQTYICNVNHKPSNTKVDKKVEPKSCDKTHTCPPCPAPELLGGPSVFLFPPKPKDTLMISRTPEVTCVVVDVSHEDPEVKFNWYVDGVEVHNAKTKPCEEQYGSTYRCVSVLTVLHQDWLNGKEYKCKVSNKALPAPIEKTISKAKGQPREPQVYTLPPSREEMTKNQVSLTCLVKGFYPSDIAVEWESNGQPENNYKTTPPVLDSDGSFFLYSKLTVDKSRWQQGNVFSCSVMHEALHNHYTQKSLSLSPGGGGSGGGGSEVQLVESGGGLVQPGRSLRLSCAASGFTFDDYAMHWVRKAPGKGLEWVSAITWNSGHIDYADSVEGRFTISRDNAKNSLYLQMNSLRAEDTAVYYCAKVSYLSTASSLDYWGQGTLVTVSSTVAAPSVFIFPPSDEQLKSGTASVVCLLNNFYPREAKVQWKVDNALQSGNSQESVTEQDSKDSTYSLESTLTLSKADYEKHKVYACEVTHQGLSSPVTKSFNRGEC

SEQ ID NO: 474 - protein, 211 aa, synthetic construct
  REGION 1..211: note = source = /note="Description of Artificial Sequence: Synthetic polypeptide"
DIQMTQSPSSLSASVGDRVTITCRASQGIRNYLAWYQEKPGKAPKLLIYAASTLQSGVPSRFSGSGSGTDFTLTISSLQPEDVATYYCQRYNRAPYTFGQGTKVEIKRASTKGPSVFPLAPSSKSTSGGTAALGCLVKDYFPEPVTVSWNSGALTSGVHTFPAVLQSSGLYSLKSVVTVPSSSLGTQTYICNVNHKPSNTKVDKKVEPKSC

SEQ ID NO: 475 - DNA, 642 bp, synthetic construct; identical to SEQ ID NO: 325
  misc_feature 1..642: note = source = /note="Description of Artificial Sequence: Synthetic polynucleotide"
  source 1..642: mol_type = other DNA

SEQ ID NO: 476 - DNA, 2037 bp, synthetic construct
  misc_feature 1..2037: note = source = /note="Description of Artificial Sequence: Synthetic polynucleotide"
  source 1..2037: mol_type = other DNA
caggtgcagttacagcagtcgggcgcaggactgttgaagccttcggagaccctgtccctcacctgcgctgtccatggtgggtccttcagtggttactactggaactggatccgcaagccaccagggaaggggctagagtggattggggaaatcaatcatgctggaaacaccaactacaacccgtccctcaagagtcgagtcaccatatcattagacacgtccaagaaccagttctccctgacgctgacctctgtgaccgccgcggacacggctgtgtattactgtgcgagaggatattgtagaagtaccacctgctactttgactactggggccagggaaccctagtcaccgtctcctcagcctccaccaagggcccatcggtcttccccctggcaccctcctccaagagcacctctgggggcacagcggccctgggctgcctggtcaaggactacttccccgaaccggtgacggtgtcgtggaactcaggcgccctgaccagcggcgtgcacaccttcccggctgtcctacagtcctcaggactctactccctcaaaagcgtggtgaccgtgccctccagcagcttgggcacccagacctacatctgcaacgtgaatcacaagcccagcaacaccaaggtggacaagaaagttgagcccaaatcttgtgacaaaactcacacatgcccaccgtgcccagcacctgaactcctggggggaccgtcagtcttcctcttccccccaaaacccaaggacaccctcatgatctcccggacccctgaggtcacatgcgtggtggtggacgtgagccacgaagaccctgaggtcaagttcaactggtacgtggacggcgtggaggtgcataatgccaagacaaagccgtgtgaggagcagtacggcagcacgtaccgttgtgtcagcgtcctcaccgtcctgcaccaggactggctgaatggcaaggagtacaagtgcaaggtctccaacaaagccctcccagcccccatcgagaaaaccatctccaaagccaaagggcagccccgagaaccacaggtgtacaccctgcccccatcccgggaggagatgaccaagaaccaggtcagcctgacctgcctggtcaaaggcttctatcccagcgacatcgccgtggagtgggagagcaatgggcagccggagaacaactacaagaccacgcctcccgtgctggactccgacggctccttcttcctctatagcaagctcaccgtggacaagagcaggtggcagcaggggaacgtcttctcatgctccgtgatgcatgaggctctgcacaaccactacacgcagaagagcctctccctgtctccgggtggtggcggatcgggaggtggcggatccgaggtgcagctggtgcagtctggagcagaggtgaaaaagcccggggagtctctgaagatctcctgtaagacttctgaatacagctttaccagctactggatcggctgggtgcgcaagatgcccgggaaaggcctggagtggatggggatcatctatcttggtgactcagataccagatacagcccgtccttccaaggccaggtcaccatctcagccgacaagtccatcagtaccgcctacctgcagtggagcagcctgaaggcctcggacaccgccatgtattactgtgcgagaagtaactggggtcttgactactggggccagggaaccctggtcaccgtctctagtcagcccaaggccaaccccactgtcactctgttcccgccctcctctgaggagctccaagccaacaaggccacactagtgtgtctgatcagtgacttctacccgggagctgtgacagtggcctggaaggcagatggcagccccgtcaaggcgggagtggagaccaccaaaccctccaaacagagcaacaacaagtacgcggccgagagctacctgagcctgacgcccgagcagtggaagtcccacagaagctacagctgccaggtcacgcatgaagggagcaccgtggagaagacagtggcccctacagaatgttca

SEQ ID NO: 477 - DNA, 645 bp, synthetic construct
  misc_feature 1..645: note = source = /note="Description of Artificial Sequence: Synthetic polynucleotide"
  source 1..645: mol_type = other DNA
cagtctgtgctgacgcagccgccctcagtgtctggggccccagggcagagggtcaccatctcctgcactgggagcagttccaacatcggggcaggttatgatgtacactggtaccaggagtttccaggaacagcccccaaactcctcatccaaggtaacagcaatcggccctcaggggtccctgaccgattctctggctccaagtctggcacctcagcctccctggccatcactgggctccaggctgaggatgaggctgattattactgccagtcctatgacagcagcctgagtggttcggtgttcggcggagggaccaagctgaccgtcctaggtgcctccaccaagggcccatcggtcttccccctggcaccctcctccaagagcacctctgggggcacagcggccctgggctgcctggtcaaggactacttccccgaaccggtgacggtgtcgtggaactcaggcgccctgaccagcggcgtgcacaccttcccggctgtcctacagtcctcaggactctactccctcaaaagcgtggtgaccgtgccctccagcagcttgggcacccagacctacatctgcaacgtgaatcacaagcccagcaacaccaaggtggacaagaaagttgagcccaaatcttgt

SEQ ID NO: 478 - protein, 214 aa, synthetic construct; identical to SEQ ID NO: 328
  REGION 1..214: note = source = /note="Description of Artificial Sequence: Synthetic polypeptide"

SEQ ID NO: 479 - protein, 679 aa, synthetic construct
  REGION 1..679: note = source = /note="Description of Artificial Sequence: Synthetic polypeptide"
QVQLQQSGAGLLKPSETLSLTCAVHGGSFSGYYWNWIRKPPGKGLEWIGEINHAGNTNYNPSLKSRVTISLDTSKNQFSLTLTSVTAADTAVYYCARGYCRSTTCYFDYWGQGTLVTVSSASTKGPSVFPLAPSSKSTSGGTAALGCLVKDYFPEPVTVSWNSGALTSGVHTFPAVLQSSGLYSLKSVVTVPSSSLGTQTYICNVNHKPSNTKVDKKVEPKSCDKTHTCPPCPAPELLGGPSVFLFPPKPKDTLMISRTPEVTCVVVDVSHEDPEVKFNWYVDGVEVHNAKTKPCEEQYGSTYRCVSVLTVLHQDWLNGKEYKCKVSNKALPAPIEKTISKAKGQPREPQVYTLPPSREEMTKNQVSLTCLVKGFYPSDIAVEWESNGQPENNYKTTPPVLDSDGSFFLYSKLTVDKSRWQQGNVFSCSVMHEALHNHYTQKSLSLSPGGGGSGGGGSEVQLVQSGAEVKKPGESLKISCKTSEYSFTSYWIGWVRKMPGKGLEWMGIIYLGDSDTRYSPSFQGQVTISADKSISTAYLQWSSLKASDTAMYYCARSNWGLDYWGQGTLVTVSSQPKANPTVTLFPPSSEELQANKATLVCLISDFYPGAVTVAWKADGSPVKAGVETTKPSKQSNNKYAAESYLSLTPEQWKSHRSYSCQVTHEGSTVEKTVAPTECS

SEQ ID NO: 480 - protein, 215 aa, synthetic construct
  REGION 1..215: note = source = /note="Description of Artificial Sequence: Synthetic polypeptide"
QSVLTQPPSVSGAPGQRVTISCTGSSSNIGAGYDVHWYQEFPGTAPKLLIQGNSNRPSGVPDRFSGSKSGTSASLAITGLQAEDEADYYCQSYDSSLSGSVFGGGTKLTVLGASTKGPSVFPLAPSSKSTSGGTAALGCLVKDYFPEPVTVSWNSGALTSGVHTFPAVLQSSGLYSLKSVVTVPSSSLGTQTYICNVNHKPSNTKVDKKVEPKSC

SEQ ID NO: 481 - DNA, 642 bp, synthetic construct; identical to SEQ ID NO: 337
  misc_feature 1..642: note = source = /note="Description of Artificial Sequence: Synthetic polynucleotide"
  source 1..642: mol_type = other DNA

SEQ ID NO: 482 - DNA, 2049 bp, synthetic construct
  misc_feature 1..2049: note = source = /note="Description of Artificial Sequence: Synthetic polynucleotide"
  source 1..2049: mol_type = other DNA
caggtgcagctgcaggagtcgggcccaggactggtgaagccttcggagaccctgtccctcacctgcactgtctctggtggctccatcagtagttacttctggagctggatccggaagcccccaggtaagggactggagtggattggctatatctattacagtgggcagaccaaatacaacccctccctcaagagtcgagtcaccatatcaatagacacgtccaagaaccagttctccctgaagctgagctctgtgaccgctgcggacacggccgtgtattactgtgcgagagaaactgggagctactacggctttgactactggggccagggaaccctggtcaccgtctcctcagcctccaccaagggcccatcggtcttccccctggcaccctcctccaagagcacctctgggggcacagcggccctgggctgcctggtcaaggactacttccccgaaccggtgacggtgtcgtggaactcaggcgccctgaccagcggcgtgcacaccttcccggctgtcctacagtcctcaggactctactccctcaaaagcgtggtgaccgtgccctccagcagcttgggcacccagacctacatctgcaacgtgaatcacaagcccagcaacaccaaggtggacaagaaagttgagcccaaatcttgtgacaaaactcacacatgcccaccgtgcccagcacctgaactcctggggggaccgtcagtcttcctcttccccccaaaacccaaggacaccctcatgatctcccggacccctgaggtcacatgcgtggtggtggacgtgagccacgaagaccctgaggtcaagttcaactggtacgtggacggcgtggaggtgcataatgccaagacaaagccgtgtgaggagcagtacggcagcacgtaccgttgtgtcagcgtcctcaccgtcctgcaccaggactggctgaatggcaaggagtacaagtgcaaggtctccaacaaagccctcccagcccccatcgagaaaaccatctccaaagccaaagggcagccccgagaaccacaggtgtacaccctgcccccatcccgggaggagatgaccaagaaccaggtcagcctgacctgcctggtcaaaggcttctatcccagcgacatcgccgtggagtgggagagcaatgggcagccggagaacaactacaagaccacgcctcccgtgctggactccgacggctccttcttcctctatagcaagctcaccgtggacaagagcaggtggcagcaggggaacgtcttctcatgctccgtgatgcatgaggctctgcacaaccactacacgcagaagagcctctccctgtctccgggtggtggcggatcgggaggtggcggatccgaggtacaactggtggaatcaggtggaggtttggtgcagccggggagatcgctcaggcttagctgtgcggcatcggggtttactttcgatgattatgcgatgcattgggtccggaaagcgcctggaaaagggctcgagtgggtttccgccattacgtggaatagcggacacatcgattatgcagacagtgtggagggcagattcacaatctcacgagacaatgctaagaacagcctgtaccttcagatgaactcacttcgcgcggaagataccgccgtatactactgcgccaaagtctcctacttgtctacagcttcgtcgctcgactattggggtcaaggaacgttggtcaccgtctctagtactgtggctgcaccatctgtcttcatcttcccgccatctgatgagcagttgaaatctggaactgcctctgttgtgtgcctgctgaataacttctatcccagagaggccaaagtacagtggaaggtggataacgccctccaatcgggtaactcccaggagagtgtcacagagcaggacagcaaggacagcacctacagcctcgaaagcaccctgacgctgagcaaagcagactacgagaaacacaaagtctacgcctgcgaagtcacccatcagggcctgagctcgcccgtcacaaagagcttcaacaggggagagtgt

SEQ ID NO: 483 - DNA, 633 bp, synthetic construct; identical to SEQ ID NO: 471
  misc_feature 1..633: note = source = /note="Description of Artificial Sequence: Synthetic polynucleotide"
  source 1..633: mol_type = other DNA

SEQ ID NO: 484 - protein, 214 aa, synthetic construct; identical to SEQ ID NO: 340
  REGION 1..214: note = source = /note="Description of Artificial Sequence: Synthetic polypeptide"

SEQ ID NO: 485 - protein, 683 aa, synthetic construct
  REGION 1..683: note = source = /note="Description of Artificial Sequence: Synthetic polypeptide"
QVQLQESGPGLVKPSETLSLTCTVSGGSISSYFWSWIRKPPGKGLEWIGYIYYSGQTKYNPSLKSRVTISIDTSKNQFSLKLSSVTAADTAVYYCARETGSYYGFDYWGQGTLVTVSSASTKGPSVFPLAPSSKSTSGGTAALGCLVKDYFPEPVTVSWNSGALTSGVHTFPAVLQSSGLYSLKSVVTVPSSSLGTQTYICNVNHKPSNTKVDKKVEPKSCDKTHTCPPCPAPELLGGPSVFLFPPKPKDTLMISRTPEVTCVVVDVSHEDPEVKFNWYVDGVEVHNAKTKPCEEQYGSTYRCVSVLTVLHQDWLNGKEYKCKVSNKALPAPIEKTISKAKGQPREPQVYTLPPSREEMTKNQVSLTCLVKGFYPSDIAVEWESNGQPENNYKTTPPVLDSDGSFFLYSKLTVDKSRWQQGNVFSCSVMHEALHNHYTQKSLSLSPGGGGSGGGGSEVQLVESGGGLVQPGRSLRLSCAASGFTFDDYAMHWVRKAPGKGLEWVSAITWNSGHIDYADSVEGRFTISRDNAKNSLYLQMNSLRAEDTAVYYCAKVSYLSTASSLDYWGQGTLVTVSSTVAAPSVFIFPPSDEQLKSGTASVVCLLNNFYPREAKVQWKVDNALQSGNSQESVTEQDSKDSTYSLESTLTLSKADYEKHKVYACEVTHQGLSSPVTKSFNRGEC

SEQ ID NO: 486 - protein, 211 aa, synthetic construct; identical to SEQ ID NO: 474
  REGION 1..211: note = source = /note="Description of Artificial Sequence: Synthetic polypeptide"

SEQ ID NO: 487 - DNA, 642 bp, synthetic construct; identical to SEQ ID NO: 337
  misc_feature 1..642: note = source = /note="Description of Artificial Sequence: Synthetic polynucleotide"
  source 1..642: mol_type = other DNA

SEQ ID NO: 488 - DNA, 2031 bp, synthetic construct
  misc_feature 1..2031: note = source = /note="Description of Artificial Sequence: Synthetic polynucleotide"
  source 1..2031: mol_type = other DNA
caggtgcagctgcaggagtcgggcccaggactggtgaagccttcggagaccctgtccctcacctgcactgtctctggtggctccatcagtagttacttctggagctggatccggaagcccccaggtaagggactggagtggattggctatatctattacagtgggcagaccaaatacaacccctccctcaagagtcgagtcaccatatcaatagacacgtccaagaaccagttctccctgaagctgagctctgtgaccgctgcggacacggccgtgtattactgtgcgagagaaactgggagctactacggctttgactactggggccagggaaccctggtcaccgtctcctcagcctccaccaagggcccatcggtcttccccctggcaccctcctccaagagcacctctgggggcacagcggccctgggctgcctggtcaaggactacttccccgaaccggtgacggtgtcgtggaactcaggcgccctgaccagcggcgtgcacaccttcccggctgtcctacagtcctcaggactctactccctcaaaagcgtggtgaccgtgccctccagcagcttgggcacccagacctacatctgcaacgtgaatcacaagcccagcaacaccaaggtggacaagaaagttgagcccaaatcttgtgacaaaactcacacatgcccaccgtgcccagcacctgaactcctggggggaccgtcagtcttcctcttccccccaaaacccaaggacaccctcatgatctcccggacccctgaggtcacatgcgtggtggtggacgtgagccacgaagaccctgaggtcaagttcaactggtacgtggacggcgtggaggtgcataatgccaagacaaagccgtgtgaggagcagtacggcagcacgtaccgttgtgtcagcgtcctcaccgtcctgcaccaggactggctgaatggcaaggagtacaagtgcaaggtctccaacaaagccctcccagcccccatcgagaaaaccatctccaaagccaaagggcagccccgagaaccacaggtgtacaccctgcccccatcccgggaggagatgaccaagaaccaggtcagcctgacctgcctggtcaaaggcttctatcccagcgacatcgccgtggagtgggagagcaatgggcagccggagaacaactacaagaccacgcctcccgtgctggactccgacggctccttcttcctctatagcaagctcaccgtggacaagagcaggtggcagcaggggaacgtcttctcatgctccgtgatgcatgaggctctgcacaaccactacacgcagaagagcctctccctgtctccgggtggtggcggatcgggaggtggcggatccgaggtgcagctggtgcagtctggagcagaggtgaaaaagcccggggagtctctgaagatctcctgtaagacttctgaatacagctttaccagctactggatcggctgggtgcgcaagatgcccgggaaaggcctggagtggatggggatcatctatcttggtgactcagataccagatacagcccgtccttccaaggccaggtcaccatctcagccgacaagtccatcagtaccgcctacctgcagtggagcagcctgaaggcctcggacaccgccatgtattactgtgcgagaagtaactggggtcttgactactggggccagggaaccctggtcaccgtctctagtcagcccaaggccaaccccactgtcactctgttcccgccctcctctgaggagctccaagccaacaaggccacactagtgtgtctgatcagtgacttctacccgggagctgtgacagtggcctggaaggcagatggcagccccgtcaaggcgggagtggagaccaccaaaccctccaaacagagcaacaacaagtacgcggccgagagctacctgagcctgacgcccgagcagtggaagtcccacagaagctacagctgccaggtcacgcatgaagggagcaccgtggagaagacagtggcccctacagaatgttca

SEQ ID NO: 489 - DNA, 645 bp, synthetic construct; identical to SEQ ID NO: 477
  misc_feature 1..645: note = source = /note="Description of Artificial Sequence: Synthetic polynucleotide"
  source 1..645: mol_type = other DNA

SEQ ID NO: 490 - protein, 214 aa, synthetic construct; identical to SEQ ID NO: 340
  REGION 1..214: note = source = /note="Description of Artificial Sequence: Synthetic polypeptide"

SEQ ID NO: 491 - protein, 677 aa, synthetic construct
  REGION 1..677: note = source = /note="Description of Artificial Sequence: Synthetic polypeptide"
QVQLQESGPGLVKPSETLSLTCTVSGGSISSYFWSWIRKPPGKGLEWIGYIYYSGQTKYNPSLKSRVTISIDTSKNQFSLKLSSVTAADTAVYYCARETGSYYGFDYWGQGTLVTVSSASTKGPSVFPLAPSSKSTSGGTAALGCLVKDYFPEPVTVSWNSGALTSGVHTFPAVLQSSGLYSLKSVVTVPSSSLGTQTYICNVNHKPSNTKVDKKVEPKSCDKTHTCPPCPAPELLGGPSVFLFPPKPKDTLMISRTPEVTCVVVDVSHEDPEVKFNWYVDGVEVHNAKTKPCEEQYGSTYRCVSVLTVLHQDWLNGKEYKCKVSNKALPAPIEKTISKAKGQPREPQVYTLPPSREEMTKNQVSLTCLVKGFYPSDIAVEWESNGQPENNYKTTPPVLDSDGSFFLYSKLTVDKSRWQQGNVFSCSVMHEALHNHYTQKSLSLSPGGGGSGGGGSEVQLVQSGAEVKKPGESLKISCKTSEYSFTSYWIGWVRKMPGKGLEWMGIIYLGDSDTRYSPSFQGQVTISADKSISTAYLQWSSLKASDTAMYYCARSNWGLDYWGQGTLVTVSSQPKANPTVTLFPPSSEELQANKATLVCLISDFYPGAVTVAWKADGSPVKAGVETTKPSKQSNNKYAAESYLSLTPEQWKSHRSYSCQVTHEGSTVEKTVAPTECS

SEQ ID NO: 492 - protein, 215 aa, synthetic construct; identical to SEQ ID NO: 480
  REGION 1..215: note = source = /note="Description of Artificial Sequence: Synthetic polypeptide"

SEQ ID NO: 493 - DNA, 660 bp, synthetic construct; identical to SEQ ID NO: 349
  misc_feature 1..660: note = source = /note="Description of Artificial Sequence: Synthetic polynucleotide"
  source 1..660: mol_type = other DNA

SEQ ID NO: 494 - DNA, 2070 bp, synthetic construct
  misc_feature 1..2070: note = source = /note="Description of Artificial Sequence: Synthetic polynucleotide"
  source 1..2070: mol_type = other DNA
caggtacagttgcaggagtcaggtccaggactggtgaagccctcggagaccctctcactcacctgtaccatctccggggacagtgtctctaccaacagtgttgcttggaactggatcaggaagcccccagggaaaggccttgagtggataggaaggacatactacaggtccaagtggtataatgattatgcagtttctctgaaaagtcgagtaaccatcagcccagacacatccaagaaccagttctccctgaagctgagctctgtgactgccgcggacacggctgtgtattactgtgcaagagaggatggggatagctactaccgctacggtatggacgtctggggccaagggaccacggtcaccgtctcctcagcctccaccaagggcccatcggtcttccccctggcaccctcctccaagagcacctctgggggcacagcggccctgggctgcctggtcaaggactacttccccgaaccggtgacggtgtcgtggaactcaggcgccctgaccagcggcgtgcacaccttcccggctgtcctacagtcctcaggactctactccctcaaaagcgtggtgaccgtgccctccagcagcttgggcacccagacctacatctgcaacgtgaatcacaagcccagcaacaccaaggtggacaagaaagttgagcccaaatcttgtgacaaaactcacacatgcccaccgtgcccagcacctgaactcctggggggaccgtcagtcttcctcttccccccaaaacccaaggacaccctcatgatctcccggacccctgaggtcacatgcgtggtggtggacgtgagccacgaagaccctgaggtcaagttcaactggtacgtggacggcgtggaggtgcataatgccaagacaaagccgtgtgaggagcagtacggcagcacgtaccgttgtgtcagcgtcctcaccgtcctgcaccaggactggctgaatggcaaggagtacaagtgcaaggtctccaacaaagccctcccagcccccatcgagaaaaccatctccaaagccaaagggcagccccgagaaccacaggtgtacaccctgcccccatcccgggaggagatgaccaagaaccaggtcagcctgacctgcctggtcaaaggcttctatcccagcgacatcgccgtggagtgggagagcaatgggcagccggagaacaactacaagaccacgcctcccgtgctggactccgacggctccttcttcctctatagcaagctcaccgtggacaagagcaggtggcagcaggggaacgtcttctcatgctccgtgatgcatgaggctctgcacaaccactacacgcagaagagcctctccctgtctccgggtggtggcggatcgggaggtggcggatccgaggtacaactggtggaatcaggtggaggtttggtgcagccggggagatcgctcaggcttagctgtgcggcatcggggtttactttcgatgattatgcgatgcattgggtccggaaagcgcctggaaaagggctcgagtgggtttccgccattacgtggaatagcggacacatcgattatgcagacagtgtggagggcagattcacaatctcacgagacaatgctaagaacagcctgtaccttcagatgaactcacttcgcgcggaagataccgccgtatactactgcgccaaagtctcctacttgtctacagcttcgtcgctcgactattggggtcaaggaacgttggtcaccgtctctagtactgtggctgcaccatctgtcttcatcttcccgccatctgatgagcagttgaaatctggaactgcctctgttgtgtgcctgctgaataacttctatcccagagaggccaaagtacagtggaaggtggataacgccctccaatcgggtaactcccaggagagtgtcacagagcaggacagcaaggacagcacctacagcctcgaaagcaccctgacgctgagcaaagcagactacgagaaacacaaagtctacgcctgcgaagtcacccatcagggcctgagctcgcccgtcacaaagagcttcaacaggggagagtgt

SEQ ID NO: 495 - DNA, 633 bp, synthetic construct; identical to SEQ ID NO: 471
  misc_feature 1..633: note = source = /note="Description of Artificial Sequence: Synthetic polynucleotide"
  source 1..633: mol_type = other DNA

SEQ ID NO: 496 - protein, 220 aa, synthetic construct; identical to SEQ ID NO: 352
  REGION 1..220: note = source = /note="Description of Artificial Sequence: Synthetic polypeptide"

SEQ ID NO: 497 - protein, 690 aa, synthetic construct
  REGION 1..690: note = source = /note="Description of Artificial Sequence: Synthetic polypeptide"
QVQLQESGPGLVKPSETLSLTCTISGDSVSTNSVAWNWIRKPPGKGLEWIGRTYYRSKWYNDYAVSLKSRVTISPDTSKNQFSLKLSSVTAADTAVYYCAREDGDSYYRYGMDVWGQGTTVTVSSASTKGPSVFPLAPSSKSTSGGTAALGCLVKDYFPEPVTVSWNSGALTSGVHTFPAVLQSSGLYSLKSVVTVPSSSLGTQTYICNVNHKPSNTKVDKKVEPKSCDKTHTCPPCPAPELLGGPSVFLFPPKPKDTLMISRTPEVTCVVVDVSHEDPEVKFNWYVDGVEVHNAKTKPCEEQYGSTYRCVSVLTVLHQDWLNGKEYKCKVSNKALPAPIEKTISKAKGQPREPQVYTLPPSREEMTKNQVSLTCLVKGFYPSDIAVEWESNGQPENNYKTTPPVLDSDGSFFLYSKLTVDKSRWQQGNVFSCSVMHEALHNHYTQKSLSLSPGGGGSGGGGSEVQLVESGGGLVQPGRSLRLSCAASGFTFDDYAMHWVRKAPGKGLEWVSAITWNSGHIDYADSVEGRFTISRDNAKNSLYLQMNSLRAEDTAVYYCAKVSYLSTASSLDYWGQGTLVTVSSTVAAPSVFIFPPSDEQLKSGTASVVCLLNNFYPREAKVQWKVDNALQSGNSQESVTEQDSKDSTYSLESTLTLSKADYEKHKVYACEVTHQGLSSPVTKSFNRGEC

SEQ ID NO: 498 - protein, 211 aa, synthetic construct; identical to SEQ ID NO: 474
  REGION 1..211: note = source = /note="Description of Artificial Sequence: Synthetic polypeptide"

SEQ ID NO: 499 - DNA, 660 bp, synthetic construct; identical to SEQ ID NO: 349
  misc_feature 1..660: note = source = /note="Description of Artificial Sequence: Synthetic polynucleotide"
  source 1..660: mol_type = other DNA

SEQ ID NO: 500 - DNA, 2052 bp, synthetic construct
  misc_feature 1..2052: note = source = /note="Description of Artificial Sequence: Synthetic polynucleotide"
  source 1..2052: mol_type = other DNA
caggtacagttgcaggagtcaggtccaggactggtgaagccctcggagaccctctcactcacctgtaccatctccggggacagtgtctctaccaacagtgttgcttggaactggatcaggaagcccccagggaaaggccttgagtggataggaaggacatactacaggtccaagtggtataatgattatgcagtttctctgaaaagtcgagtaaccatcagcccagacacatccaagaaccagttctccctgaagctgagctctgtgactgccgcggacacggctgtgtattactgtgcaagagaggatggggatagctactaccgctacggtatggacgtctggggccaagggaccacggtcaccgtctcctcagcctccaccaagggcccatcggtcttccccctggcaccctcctccaagagcacctctgggggcacagcggccctgggctgcctggtcaaggactacttccccgaaccggtgacggtgtcgtggaactcaggcgccctgaccagcggcgtgcacaccttcccggctgtcctacagtcctcaggactctactccctcaaaagcgtggtgaccgtgccctccagcagcttgggcacccagacctacatctgcaacgtgaatcacaagcccagcaacaccaaggtggacaagaaagttgagcccaaatcttgtgacaaaactcacacatgcccaccgtgcccagcacctgaactcctggggggaccgtcagtcttcctcttccccccaaaacccaaggacaccctcatgatctcccggacccctgaggtcacatgcgtggtggtggacgtgagccacgaagaccctgaggtcaagttcaactggtacgtggacggcgtggaggtgcataatgccaagacaaagccgtgtgaggagcagtacggcagcacgtaccgttgtgtcagcgtcctcaccgtcctgcaccaggactggctgaatggcaaggagtacaagtgcaaggtctccaacaaagccctcccagcccccatcgagaaaaccatctccaaagccaaagggcagccccgagaaccacaggtgtacaccctgcccccatcccgggaggagatgaccaagaaccaggtcagcctgacctgcctggtcaaaggcttctatcccagcgacatcgccgtggagtgggagagcaatgggcagccggagaacaactacaagaccacgcctcccgtgctggactccgacggctccttcttcctctatagcaagctcaccgtggacaagagcaggtggcagcaggggaacgtcttctcatgctccgtgatgcatgaggctctgcacaaccactacacgcagaagagcctctccctgtctccgggtggtggcggatcgggaggtggcggatccgaggtgcagctggtgcagtctggagcagaggtgaaaaagcccggggagtctctgaagatctcctgtaagacttctgaatacagctttaccagctactggatcggctgggtgcgcaagatgcccgggaaaggcctggagtggatggggatcatctatcttggtgactcagataccagatacagcccgtccttccaaggccaggtcaccatctcagccgacaagtccatcagtaccgcctacctgcagtggagcagcctgaaggcctcggacaccgccatgtattactgtgcgagaagtaactggggtcttgactactggggccagggaaccctggtcaccgtctctagtcagcccaaggccaaccccactgtcactctgttcccgccctcctctgaggagctccaagccaacaaggccacactagtgtgtctgatcagtgacttctacccgggagctgtgacagtggcctggaaggcagatggcagccccgtcaaggcgggagtggagaccaccaaaccctccaaacagagcaacaacaagtacgcggccgagagctacctgagcctgacgcccgagcagtggaagtcccacagaagctacagctgccaggtcacgcatgaagggagcaccgtggagaagacagtggcccctacagaatgttca

SEQ ID NO: 501 - DNA, 645 bp, synthetic construct; identical to SEQ ID NO: 477
  misc_feature 1..645: note = source = /note="Description of Artificial Sequence: Synthetic polynucleotide"
  source 1..645: mol_type = other DNA

SEQ ID NO: 502 - protein, 220 aa, synthetic construct; identical to SEQ ID NO: 352
  REGION 1..220: note = source = /note="Description of Artificial Sequence: Synthetic polypeptide"

SEQ ID NO: 503 - protein, 684 aa, synthetic construct
  REGION 1..684: note = source = /note="Description of Artificial Sequence: Synthetic polypeptide"
QVQLQESGPGLVKPSETLSLTCTISGDSVSTNSVAWNWIRKPPGKGLEWIGRTYYRSKWYNDYAVSLKSRVTISPDTSKNQFSLKLSSVTAADTAVYYCAREDGDSYYRYGMDVWGQGTTVTVSSASTKGPSVFPLAPSSKSTSGGTAALGCLVKDYFPEPVTVSWNSGALTSGVHTFPAVLQSSGLYSLKSVVTVPSSSLGTQTYICNVNHKPSNTKVDKKVEPKSCDKTHTCPPCPAPELLGGPSVFLFPPKPKDTLMISRTPEVTCVVVDVSHEDPEVKFNWYVDGVEVHNAKTKPCEEQYGSTYRCVSVLTVLHQDWLNGKEYKCKVSNKALPAPIEKTISKAKGQPREPQVYTLPPSREEMTKNQVSLTCLVKGFYPSDIAVEWESNGQPENNYKTTPPVLDSDGSFFLYSKLTVDKSRWQQGNVFSCSVMHEALHNHYTQKSLSLSPGGGGSGGGGSEVQLVQSGAEVKKPGESLKISCKTSEYSFTSYWIGWVRKMPGKGLEWMGIIYLGDSDTRYSPSFQGQVTISADKSISTAYLQWSSLKASDTAMYYCARSNWGLDYWGQGTLVTVSSQPKANPTVTLFPPSSEELQANKATLVCLISDFYPGAVTVAWKADGSPVKAGVETTKPSKQSNNKYAAESYLSLTPEQWKSHRSYSCQVTHEGSTVEKTVAPTECS

SEQ ID NO: 504 - protein, 215 aa, synthetic construct; identical to SEQ ID NO: 480
  REGION 1..215: note = source = /note="Description of Artificial Sequence: Synthetic polypeptide"

SEQ ID NO: 505 - DNA, 2064 bp, synthetic construct
  misc_feature 1..2064: note = source = /note="Description of Artificial Sequence: Synthetic polynucleotide"
  source 1..2064: mol_type = other DNA
gaggtacaactggtggaatcaggtggaggtttggtgcagccggggagatcgctcaggcttagctgtgcggcatcggggtttactttcgatgattatgcgatgcattgggtccggaaagcgcctggaaaagggctcgagtgggtttccgccattacgtggaatagcggacacatcgattatgcagacagtgtggagggcagattcacaatctcacgagacaatgctaagaacagcctgtaccttcagatgaactcacttcgcgcggaagataccgccgtatactactgcgccaaagtctcctacttgtctacagcttcgtcgctcgactattggggtcaaggaacgttggtcaccgtctctagtacggtggctgcaccatctgtcttcatcttcccgccatctgatgagcagttgaaatctggaactgcctctgttgtgtgcctgctgaataacttctatcccagagaggccaaagtacagtggaaggtggataacgccctccaatcgggtaactcccaggagagtgtcacagagcaggacagcaaggacagcacctacagcctcaagagcaccctgacgctgagcaaagcagactacgagaaacacaaagtctacgcctgcgaagtcacccatcagggcctgagctcgcccgtcacaaagagcttcaacaggggagagtgtgacaaaactcacacatgcccaccgtgcccagcacctgaactcctggggggaccgtcagtcttcctcttccccccaaaacccaaggacaccctcatgatctcccggacccctgaggtcacatgcgtggtggtggacgtgagccacgaagaccctgaggtcaagttcaactggtacgtggacggcgtggaggtgcataatgccaagacaaagccgtgtgaggagcagtacggcagcacgtaccgttgtgtcagcgtcctcaccgtcctgcaccaggactggctgaatggcaaggagtacaagtgcaaggtctccaacaaagccctcccagcccccatcgagaaaaccatctccaaagccaaagggcagccccgagaaccacaggtgtacaccctgcccccatcccgggaggagatgaccaagaaccaggtcagcctgacctgcctggtcaaaggcttctatcccagcgacatcgccgtggagtgggagagcaatgggcagccggagaacaactacaagaccacgcctcccgtgctggactccgacggctccttcttcctctatagcaagctcaccgtggacaagagcaggtggcagcaggggaacgtcttctcatgctccgtgatgcatgaggctctgcacaaccactacacgcagaagagcctctccctgtctccgggtggtggcggatcgggaggtggcggatcccaggtgcagttacagcagtcgggcgcaggactgttgaagccttcggagaccctgtccctcacctgcgctgtccatggtgggtccttcagtggttactactggaactggattcgcaagccaccagggaaggggctagagtggattggggaaatcaatcatgctggaaacaccaactacaacccgtccctcaagagtcgagtcaccatatcattagacacgtccaagaaccagttctccctgacgctgacctctgtgaccgccgcggacacggctgtgtattactgtgcgagaggatattgtagaagtaccacctgctactttgactactggggccagggaaccctagtcaccgtctcctcaactgtggctgcaccatctgtcttcatcttcccgccatctgatgagcagttgaaatctggaactgcctctgttgtgtgcctgctgaataacttctatcccagagaggccaaagtacagtggaaggtggataacgccctccaatcgggtaactcccaggagagtgtcacagagcaggacagcaaggacagcacctacagcctcgaaagcaccctgacgctgagcaaagcagactacgagaaacacaaagtctacgcctgcgaagtcacccatcagggcctgagctcgcccgtcacaaagagcttcaacaggggagagtgt

SEQ ID NO: 506 - DNA, 633 bp, synthetic construct; identical to SEQ ID NO: 435
  misc_feature 1..633: note = source = /note="Description of Artificial Sequence: Synthetic polynucleotide"
  source 1..633: mol_type = other DNA

SEQ ID NO: 507 - DNA, 633 bp, synthetic construct; identical to SEQ ID NO: 363
  misc_feature 1..633: note = source = /note="Description of Artificial Sequence: Synthetic polynucleotide"
  source 1..633: mol_type = other DNA

SEQ ID NO: 508 - protein, 688 aa, synthetic construct
  REGION 1..688: note = source = /note="Description of Artificial Sequence: Synthetic polypeptide"
EVQLVESGGGLVQPGRSLRLSCAASGFTFDDYAMHWVRKAPGKGLEWVSAITWNSGHIDYADSVEGRFTISRDNAKNSLYLQMNSLRAEDTAVYYCAKVSYLSTASSLDYWGQGTLVTVSSTVAAPSVFIFPPSDEQLKSGTASVVCLLNNFYPREAKVQWKVDNALQSGNSQESVTEQDSKDSTYSLKSTLTLSKADYEKHKVYACEVTHQGLSSPVTKSFNRGECDKTHTCPPCPAPELLGGPSVFLFPPKPKDTLMISRTPEVTCVVVDVSHEDPEVKFNWYVDGVEVHNAKTKPCEEQYGSTYRCVSVLTVLHQDWLNGKEYKCKVSNKALPAPIEKTISKAKGQPREPQVYTLPPSREEMTKNQVSLTCLVKGFYPSDIAVEWESNGQPENNYKTTPPVLDSDGSFFLYSKLTVDKSRWQQGNVFSCSVMHEALHNHYTQKSLSLSPGGGGSGGGGSQVQLQQSGAGLLKPSETLSLTCAVHGGSFSGYYWNWIRKPPGKGLEWIGEINHAGNTNYNPSLKSRVTISLDTSKNQFSLTLTSVTAADTAVYYCARGYCRSTTCYFDYWGQGTLVTVSSTVAAPSVFIFPPSDEQLKSGTASVVCLLNNFYPREAKVQWKVDNALQSGNSQESVTEQDSKDSTYSLESTLTLSKADYEKHKVYACEVTHQGLSSPVTKSFNRGEC

SEQ ID NO: 509 - protein, 211 aa, synthetic construct; identical to SEQ ID NO: 438
  REGION 1..211: note = source = /note="Description of Artificial Sequence: Synthetic polypeptide"

SEQ ID NO: 510 - protein, 211 aa, synthetic construct; identical to SEQ ID NO: 366
  REGION 1..211: note = source = /note="Description of Artificial Sequence: Synthetic polypeptide"

SEQ ID NO: 511 - DNA, 2058 bp, synthetic construct
  misc_feature 1..2058: note = source = /note="Description of Artificial Sequence: Synthetic polynucleotide"
  source 1..2058: mol_type = other DNA
gaggtacaactggtggaatcaggtggaggtttggtgcagccggggagatcgctcaggcttagctgtgcggcatcggggtttactttcgatgattatgcgatgcattgggtccggaaagcgcctggaaaagggctcgagtgggtttccgccattacgtggaatagcggacacatcgattatgcagacagtgtggagggcagattcacaatctcacgagacaatgctaagaacagcctgtaccttcagatgaactcacttcgcgcggaagataccgccgtatactactgcgccaaagtctcctacttgtctacagcttcgtcgctcgactattggggtcaaggaacgttggtcaccgtctctagtacggtggctgcaccatctgtcttcatcttcccgccatctgatgagcagttgaaatctggaactgcctctgttgtgtgcctgctgaataacttctatcccagagaggccaaagtacagtggaaggtggataacgccctccaatcgggtaactcccaggagagtgtcacagagcaggacagcaaggacagcacctacagcctcaagagcaccctgacgctgagcaaagcagactacgagaaacacaaagtctacgcctgcgaagtcacccatcagggcctgagctcgcccgtcacaaagagcttcaacaggggagagtgtgacaaaactcacacatgcccaccgtgcccagcacctgaactcctggggggaccgtcagtcttcctcttccccccaaaacccaaggacaccctcatgatctcccggacccctgaggtcacatgcgtggtggtggacgtgagccacgaagaccctgaggtcaagttcaactggtacgtggacggcgtggaggtgcataatgccaagacaaagccgtgtgaggagcagtacggcagcacgtaccgttgtgtcagcgtcctcaccgtcctgcaccaggactggctgaatggcaaggagtacaagtgcaaggtctccaacaaagccctcccagcccccatcgagaaaaccatctccaaagccaaagggcagccccgagaaccacaggtgtacaccctgcccccatcccgggaggagatgaccaagaaccaggtcagcctgacctgcctggtcaaaggcttctatcccagcgacatcgccgtggagtgggagagcaatgggcagccggagaacaactacaagaccacgcctcccgtgctggactccgacggctccttcttcctctatagcaagctcaccgtggacaagagcaggtggcagcaggggaacgtcttctcatgctccgtgatgcatgaggctctgcacaaccactacacgcagaagagcctctccctgtctccgggtggtggcggatcgggaggtggcggatcccaggtgcagctgcaggagtcgggcccaggactggtgaagccttcggagaccctgtccctcacctgcactgtctctggtggctccatcagtagttacttctggagctggattcggaagcccccaggtaagggactggagtggattggctatatctattacagtgggcagaccaaatacaacccctccctcaagagtcgagtcaccatatcaatagacacgtccaagaaccagttctccctgaagctgagctctgtgaccgctgcggacacggccgtgtattactgtgcgagagaaactgggagctactacggctttgactactggggccagggaaccctggtcaccgtctcctcaactgtggctgcaccatctgtcttcatcttcccgccatctgatgagcagttgaaatctggaactgcctctgttgtgtgcctgctgaataacttctatcccagagaggccaaagtacagtggaaggtggataacgccctccaatcgggtaactcccaggagagtgtcacagagcaggacagcaaggacagcacctacagcctcgaaagcaccctgacgctgagcaaagcagactacgagaaacacaaagtctacgcctgcgaagtcacccatcagggcctgagctcgcccgtcacaaagagcttcaacaggggagagtgt

SEQ ID NO: 512 - DNA, 633 bp, synthetic construct; identical to SEQ ID NO: 441
  misc_feature 1..633: note = source = /note="Description of Artificial Sequence: Synthetic polynucleotide"
  source 1..633: mol_type = other DNA

SEQ ID NO: 513 - DNA, 633 bp, synthetic construct; identical to SEQ ID NO: 363
  misc_feature 1..633: note = source = /note="Description of Artificial Sequence: Synthetic polynucleotide"
  source 1..633: mol_type = other DNA

SEQ ID NO: 514 - protein, 686 aa, synthetic construct
  REGION 1..686: note = source = /note="Description of Artificial Sequence: Synthetic polypeptide"
EVQLVESGGGLVQPGRSLRLSCAASGFTFDDYAMHWVRKAPGKGLEWVSAITWNSGHIDYADSVEGRFTISRDNAKNSLYLQMNSLRAEDTAVYYCAKVSYLSTASSLDYWGQGTLVTVSSTVAAPSVFIFPPSDEQLKSGTASVVCLLNNFYPREAKVQWKVDNALQSGNSQESVTEQDSKDSTYSLKSTLTLSKADYEKHKVYACEVTHQGLSSPVTKSFNRGECDKTHTCPPCPAPELLGGPSVFLFPPKPKDTLMISRTPEVTCVVVDVSHEDPEVKFNWYVDGVEVHNAKTKPCEEQYGSTYRCVSVLTVLHQDWLNGKEYKCKVSNKALPAPIEKTISKAKGQPREPQVYTLPPSREEMTKNQVSLTCLVKGFYPSDIAVEWESNGQPENNYKTTPPVLDSDGSFFLYSKLTVDKSRWQQGNVFSCSVMHEALHNHYTQKSLSLSPGGGGSGGGGSQVQLQESGPGLVKPSETLSLTCTVSGGSISSYFWSWIRKPPGKGLEWIGYIYYSGQTKYNPSLKSRVTISIDTSKNQFSLKLSSVTAADTAVYYCARETGSYYGFDYWGQGTLVTVSSTVAAPSVFIFPPSDEQLKSGTASVVCLLNNFYPREAKVQWKVDNALQSGNSQESVTEQDSKDSTYSLESTLTLSKADYEKHKVYACEVTHQGLSSPVTKSFNRGEC

SEQ ID NO: 515 - protein, 211 aa, synthetic construct; identical to SEQ ID NO: 444
  REGION 1..211: note = source = /note="Description of Artificial Sequence: Synthetic polypeptide"

SEQ ID NO: 516 - protein, 211 aa, synthetic construct; identical to SEQ ID NO: 366
  REGION 1..211: note = source = /note="Description of Artificial Sequence: Synthetic polypeptide"

SEQ ID NO: 517 - DNA, 2079 bp, synthetic construct
  misc_feature 1..2079: note = source = /note="Description of Artificial Sequence: Synthetic polynucleotide"
  source 1..2079: mol_type = other DNA
gaggtacaactggtggaatcaggtggaggtttggtgcagccggggagatcgctcaggcttagctgtgcggcatcggggtttactttcgatgattatgcgatgcattgggtccggaaagcgcctggaaaagggctcgagtgggtttccgccattacgtggaatagcggacacatcgattatgcagacagtgtggagggcagattcacaatctcacgagacaatgctaagaacagcctgtaccttcagatgaactcacttcgcgcggaagataccgccgtatactactgcgccaaagtctcctacttgtctacagcttcgtcgctcgactattggggtcaaggaacgttggtcaccgtctctagtacggtggctgcaccatctgtcttcatcttcccgccatctgatgagcagttgaaatctggaactgcctctgttgtgtgcctgctgaataacttctatcccagagaggccaaagtacagtggaaggtggataacgccctccaatcgggtaactcccaggagagtgtcacagagcaggacagcaaggacagcacctacagcctcaagagcaccctgacgctgagcaaagcagactacgagaaacacaaagtctacgcctgcgaagtcacccatcagggcctgagctcgcccgtcacaaagagcttcaacaggggagagtgtgacaaaactcacacatgcccaccgtgcccagcacctgaactcctggggggaccgtcagtcttcctcttccccccaaaacccaaggacaccctcatgatctcccggacccctgaggtcacatgcgtggtggtggacgtgagccacgaagaccctgaggtcaagttcaactggtacgtggacggcgtggaggtgcataatgccaagacaaagccgtgtgaggagcagtacggcagcacgtaccgttgtgtcagcgtcctcaccgtcctgcaccaggactggctgaatggcaaggagtacaagtgcaaggtctccaacaaagccctcccagcccccatcgagaaaaccatctccaaagccaaagggcagccccgagaaccacaggtgtacaccctgcccccatcccgggaggagatgaccaagaaccaggtcagcctgacctgcctggtcaaaggcttctatcccagcgacatcgccgtggagtgggagagcaatgggcagccggagaacaactacaagaccacgcctcccgtgctggactccgacggctccttcttcctctatagcaagctcaccgtggacaagagcaggtggcagcaggggaacgtcttctcatgctccgtgatgcatgaggctctgcacaaccactacacgcagaagagcctctccctgtctccgggtggtggcggatcgggaggtggcggatcccaggtacagttgcaggagtcaggtccaggactggtgaagccctcggagaccctctcactcacctgtaccatctccggggacagtgtctctaccaacagtgttgcttggaactggattaggaagcccccagggaaaggccttgagtggataggaaggacatactacaggtccaagtggtataatgattatgcagtttctctgaaaagtcgagtaaccatcagcccagacacatccaagaaccagttctccctgaagctgagctctgtgactgccgcggacacggctgtgtattactgtgcaagagaggatggggatagctactaccgctacggtatggacgtctggggccaagggaccacggtcaccgtctcctcaactgtggctgcaccatctgtcttcatcttcccgccatctgatgagcagttgaaatctggaactgcctctgttgtgtgcctgctgaataacttctatcccagagaggccaaagtacagtggaaggtggataacgccctccaatcgggtaactcccaggagagtgtcacagagcaggacagcaaggacagcacctacagcctcgaaagcaccctgacgctgagcaaagcagactacgagaaacacaaagtctacgcctgcgaagtcacccatcagggcctgagctcgcccgtcacaaagagcttcaacaggggagagtgt

SEQ ID NO: 518 - DNA, 651 bp, synthetic construct; identical to SEQ ID NO: 447
  misc_feature 1..651: note = source = /note="Description of Artificial Sequence: Synthetic polynucleotide"
  source 1..651: mol_type = other DNA

SEQ ID NO: 519 - DNA, 633 bp, synthetic construct; identical to SEQ ID NO: 363
  misc_feature 1..633: note = source = /note="Description of Artificial Sequence: Synthetic polynucleotide"
  source 1..633: mol_type = other DNA

SEQ ID NO: 520 - protein, 693 aa, synthetic construct
  REGION 1..693: note = source = /note="Description of Artificial Sequence: Synthetic polypeptide"
EVQLVESGGGLVQPGRSLRLSCAASGFTFDDYAMHWVRKAPGKGLEWVSAITWNSGHIDYADSVEGRFTISRDNAKNSLYLQMNSLRAEDTAVYYCAKVSYLSTASSLDYWGQGTLVTVSSTVAAPSVFIFPPSDEQLKSGTASVVCLLNNFYPREAKVQWKVDNALQSGNSQESVTEQDSKDSTYSLKSTLTLSKADYEKHKVYACEVTHQGLSSPVTKSFNRGECDKTHTCPPCPAPELLGGPSVFLFPPKPKDTLMISRTPEVTCVVVDVSHEDPEVKFNWYVDGVEVHNAKTKPCEEQYGSTYRCVSVLTVLHQDWLNGKEYKCKVSNKALPAPIEKTISKAKGQPREPQVYTLPPSREEMTKNQVSLTCLVKGFYPSDIAVEWESNGQPENNYKTTPPVLDSDGSFFLYSKLTVDKSRWQQGNVFSCSVMHEALHNHYTQKSLSLSPGGGGSGGGGSQVQLQESGPGLVKPSETLSLTCTISGDSVSTNSVAWNWIRKPPGKGLEWIGRTYYRSKWYNDYAVSLKSRVTISPDTSKNQFSLKLSSVTAADTAVYYCAREDGDSYYRYGMDVWGQGTTVTVSSTVAAPSVFIFPPSDEQLKSGTASVVCLLNNFYPREAKVQWKVDNALQSGNSQESVTEQDSKDSTYSLESTLTLSKADYEKHKVYACEVTHQGLSSPVTKSFNRGEC

SEQ ID NO: 521 - protein, 217 aa, synthetic construct; identical to SEQ ID NO: 450
  REGION 1..217: note = source = /note="Description of Artificial Sequence: Synthetic polypeptide"

SEQ ID NO: 522 - protein, 211 aa, synthetic construct; identical to SEQ ID NO: 366
  REGION 1..211: note = source = /note="Description of Artificial Sequence: Synthetic polypeptide"

SEQ ID NO: 523 - DNA, 2046 bp, synthetic construct
  misc_feature 1..2046: note = source = /note="Description of Artificial Sequence: Synthetic polynucleotide"
  source 1..2046: mol_type = other DNA
gaggtgcagctggtgcagtctggagcagaggtgaaaaagcccggggagtctctgaagatctcctgtaagacttctgaatacagctttaccagctactggatcggctgggtgcgcaagatgcccgggaaaggcctggagtggatggggatcatctatcttggtgactcagataccagatacagcccgtccttccaaggccaggtcaccatctcagccgacaagtccatcagtaccgcctacctgcagtggagcagcctgaaggcctcggacaccgccatgtattactgtgcgagaagtaactggggtcttgactactggggccagggaaccctggtcaccgtctctagtcagcccaaggccaaccccactgtcactctgttcccgccctcctctgaggagctccaagccaacaaggccacactagtgtgtctgatcagtgacttctacccgggagctgtgacagtggcctggaaggcagatggcagccccgtcaaggcgggagtggagaccaccaaaccctccaaacagagcaacaacaagtacgcggccaagagctacctgagcctgacgcccgagcagtggaagtcccacagaagctacagctgccaggtcacgcatgaagggagcaccgtggagaagacagtggcccctacagaatgttcagacaaaactcacacatgcccaccgtgcccagcacctgaactcctggggggaccgtcagtcttcctcttccccccaaaacccaaggacaccctcatgatctcccggacccctgaggtcacatgcgtggtggtggacgtgagccacgaagaccctgaggtcaagttcaactggtacgtggacggcgtggaggtgcataatgccaagacaaagccgtgtgaggagcagtacggcagcacgtaccgttgtgtcagcgtcctcaccgtcctgcaccaggactggctgaatggcaaggagtacaagtgcaaggtctccaacaaagccctcccagcccccatcgagaaaaccatctccaaagccaaagggcagccccgagaaccacaggtgtacaccctgcccccatcccgggaggagatgaccaagaaccaggtcagcctgacctgcctggtcaaaggcttctatcccagcgacatcgccgtggagtgggagagcaatgggcagccggagaacaactacaagaccacgcctcccgtgctggactccgacggctccttcttcctctatagcaagctcaccgtggacaagagcaggtggcagcaggggaacgtcttctcatgctccgtgatgcatgaggctctgcacaaccactacacgcagaagagcctctccctgtctccgggtggtggcggatcgggaggtggcggatcccaggtgcagttacagcagtcgggcgcaggactgttgaagccttcggagaccctgtccctcacctgcgctgtccatggtgggtccttcagtggttactactggaactggattcgcaagccaccagggaaggggctagagtggattggggaaatcaatcatgctggaaacaccaactacaacccgtccctcaagagtcgagtcaccatatcattagacacgtccaagaaccagttctccctgacgctgacctctgtgaccgccgcggacacggctgtgtattactgtgcgagaggatattgtagaagtaccacctgctactttgactactggggccagggaaccctagtcaccgtctcctcaactgtggctgcaccatctgtcttcatcttcccgccatctgatgagcagttgaaatctggaactgcctctgttgtgtgcctgctgaataacttctatcccagagaggccaaagtacagtggaaggtggataacgccctccaatcgggtaactcccaggagagtgtcacagagcaggacagcaaggacagcacctacagcctcgaaagcaccctgacgctgagcaaagcagactacgagaaacacaaagtctacgcctgcgaagtcacccatcagggcctgagctcgcccgtcacaaagagcttcaacaggggagagtgt

SEQ ID NO: 524 - DNA, 633 bp, synthetic construct; identical to SEQ ID NO: 435
  misc_feature 1..633: note = source = /note="Description of Artificial Sequence: Synthetic polynucleotide"
  source 1..633: mol_type = other DNA

SEQ ID NO: 525 - DNA, 645 bp, synthetic construct; identical to SEQ ID NO: 381
  misc_feature 1..645: note = source = /note="Description of Artificial Sequence: Synthetic polynucleotide"
  source 1..645: mol_type = other DNA

SEQ ID NO: 526 - protein, 682 aa, synthetic construct
  REGION 1..682: note = source = /note="Description of Artificial Sequence: Synthetic polypeptide"
EVQLVQSGAEVKKPGESLKISCKTSEYSFTSYWIGWVRKMPGKGLEWMGIIYLGDSDTRYSPSFQGQVTISADKSISTAYLQWSSLKASDTAMYYCARSNWGLDYWGQGTLVTVSSQPKANPTVTLFPPSSEELQANKATLVCLISDFYPGAVTVAWKADGSPVKAGVETTKPSKQSNNKYAAKSYLSLTPEQWKSHRSYSCQVTHEGSTVEKTVAPTECSDKTHTCPPCPAPELLGGPSVFLFPPKPKDTLMISRTPEVTCVVVDVSHEDPEVKFNWYVDGVEVHNAKTKPCEEQYGSTYRCVSVLTVLHQDWLNGKEYKCKVSNKALPAPIEKTISKAKGQPREPQVYTLPPSREEMTKNQVSLTCLVKGFYPSDIAVEWESNGQPENNYKTTPPVLDSDGSFFLYSKLTVDKSRWQQGNVFSCSVMHEALHNHYTQKSLSLSPGGGGSGGGGSQVQLQQSGAGLLKPSETLSLTCAVHGGSFSGYYWNWIRKPPGKGLEWIGEINHAGNTNYNPSLKSRVTISLDTSKNQFSLTLTSVTAADTAVYYCARGYCRSTTCYFDYWGQGTLVTVSSTVAAPSVFIFPPSDEQLKSGTASVVCLLNNFYPREAKVQWKVDNALQSGNSQESVTEQDSKDSTYSLESTLTLSKADYEKHKVYACEVTHQGLSSPVTKSFNRGEC

SEQ ID NO: 527 - protein, 211 aa, synthetic construct; identical to SEQ ID NO: 438
  REGION 1..211: note = source = /note="Description of Artificial Sequence: Synthetic polypeptide"

SEQ ID NO: 528 - protein, 215 aa, synthetic construct; identical to SEQ ID NO: 384
  REGION 1..215: note = source = /note="Description of Artificial Sequence: Synthetic polypeptide"

SEQ ID NO: 529 - DNA, 2040 bp, synthetic construct
  misc_feature 1..2040: note = source = /note="Description of Artificial Sequence: Synthetic polynucleotide"
  source 1..2040: mol_type = other DNA
gaggtgcagctggtgcagtctggagcagaggtgaaaaagcccggggagtctctgaagatctcctgtaagacttctgaatacagctttaccagctactggatcggctgggtgcgcaagatgcccgggaaaggcctggagtggatggggatcatctatcttggtgactcagataccagatacagcccgtccttccaaggccaggtcaccatctcagccgacaagtccatcagtaccgcctacctgcagtggagcagcctgaaggcctcggacaccgccatgtattactgtgcgagaagtaactggggtcttgactactggggccagggaaccctggtcaccgtctctagtcagcccaaggccaaccccactgtcactctgttcccgccctcctctgaggagctccaagccaacaaggccacactagtgtgtctgatcagtgacttctacccgggagctgtgacagtggcctggaaggcagatggcagccccgtcaaggcgggagtggagaccaccaaaccctccaaacagagcaacaacaagtacgcggccaagagctacctgagcctgacgcccgagcagtggaagtcccacagaagctacagctgccaggtcacgcatgaagggagcaccgtggagaagacagtggcccctacagaatgttcagacaaaactcacacatgcccaccgtgcccagcacctgaactcctggggggaccgtcagtcttcctcttccccccaaaacccaaggacaccctcatgatctcccggacccctgaggtcacatgcgtggtggtggacgtgagccacgaagaccctgaggtcaagttcaactggtacgtggacggcgtggaggtgcataatgccaagacaaagccgtgtgaggagcagtacggcagcacgtaccgttgtgtcagcgtcctcaccgtcctgcaccaggactggctgaatggcaaggagtacaagtgcaaggtctccaacaaagccctcccagcccccatcgagaaaaccatctccaaagccaaagggcagccccgagaaccacaggtgtacaccctgcccccatcccgggaggagatgaccaagaaccaggtcagcctgacctgcctggtcaaaggcttctatcccagcgacatcgccgtggagtgggagagcaatgggcagccggagaacaactacaagaccacgcctcccgtgctggactccgacggctccttcttcctctatagcaagctcaccgtggacaagagcaggtggcagcaggggaacgtcttctcatgctccgtgatgcatgaggctctgcacaaccactacacgcagaagagcctctccctgtctccgggtggtggcggatcgggaggtggcggatcccaggtgcagctgcaggagtcgggcccaggactggtgaagccttcggagaccctgtccctcacctgcactgtctctggtggctccatcagtagttacttctggagctggattcggaagcccccaggtaagggactggagtggattggctatatctattacagtgggcagaccaaatacaacccctccctcaagagtcgagtcaccatatcaatagacacgtccaagaaccagttctccctgaagctgagctctgtgaccgctgcggacacggccgtgtattactgtgcgagagaaactgggagctactacggctttgactactggggccagggaaccctggtcaccgtctcctcaactgtggctgcaccatctgtcttcatcttcccgccatctgatgagcagttgaaatctggaactgcctctgttgtgtgcctgctgaataacttctatcccagagaggccaaagtacagtggaaggtggataacgccctccaatcgggtaactcccaggagagtgtcacagagcaggacagcaaggacagcacctacagcctcgaaagcaccctgacgctgagcaaagcagactacgagaaacacaaagtctacgcctgcgaagtcacccatcagggcctgagctcgcccgtcacaaagagcttcaacaggggagagtgt

SEQ ID NO: 530 - DNA, 633 bp, synthetic construct; identical to SEQ ID NO: 441
  misc_feature 1..633: note = source = /note="Description of Artificial Sequence: Synthetic polynucleotide"
  source 1..633: mol_type = other DNA

SEQ ID NO: 531 - DNA, 645 bp, synthetic construct; identical to SEQ ID NO: 381
  misc_feature 1..645: note = source = /note="Description of Artificial Sequence: Synthetic polynucleotide"
  source 1..645: mol_type = other DNA

SEQ ID NO: 532 - protein, 680 aa, synthetic construct
  REGION 1..680: note = source = /note="Description of Artificial Sequence: Synthetic polypeptide"
EVQLVQSGAEVKKPGESLKISCKTSEYSFTSYWIGWVRKMPGKGLEWMGIIYLGDSDTRYSPSFQGQVTISADKSISTAYLQWSSLKASDTAMYYCARSNWGLDYWGQGTLVTVSSQPKANPTVTLFPPSSEELQANKATLVCLISDFYPGAVTVAWKADGSPVKAGVETTKPSKQSNNKYAAKSYLSLTPEQWKSHRSYSCQVTHEGSTVEKTVAPTECSDKTHTCPPCPAPELLGGPSVFLFPPKPKDTLMISRTPEVTCVVVDVSHEDPEVKFNWYVDGVEVHNAKTKPCEEQYGSTYRCVSVLTVLHQDWLNGKEYKCKVSNKALPAPIEKTISKAKGQPREPQVYTLPPSREEMTKNQVSLTCLVKGFYPSDIAVEWESNGQPENNYKTTPPVLDSDGSFFLYSKLTVDKSRWQQGNVFSCSVMHEALHNHYTQKSLSLSPGGGGSGGGGSQVQLQESGPGLVKPSETLSLTCTVSGGSISSYFWSWIRKPPGKGLEWIGYIYYSGQTKYNPSLKSRVTISIDTSKNQFSLKLSSVTAADTAVYYCARETGSYYGFDYWGQGTLVTVSSTVAAPSVFIFPPSDEQLKSGTASVVCLLNNFYPREAKVQWKVDNALQSGNSQESVTEQDSKDSTYSLESTLTLSKADYEKHKVYACEVTHQGLSSPVTKSFNRGEC

SEQ ID NO: 533 - protein, 211 aa, synthetic construct; identical to SEQ ID NO: 444
  REGION 1..211: note = source = /note="Description of Artificial Sequence: Synthetic polypeptide"

SEQ ID NO: 534 - protein, 215 aa, synthetic construct; identical to SEQ ID NO: 384
  REGION 1..215: note = source = /note="Description of Artificial Sequence: Synthetic polypeptide"

SEQ ID NO: 535 - DNA, 2061 bp, synthetic construct
  misc_feature 1..2061: note = source = /note="Description of Artificial Sequence: Synthetic polynucleotide"
  source 1..2061: mol_type = other DNA
gaggtgcagctggtgcagtctggagcagaggtgaaaaagcccggggagtctctgaagatctcctgtaagacttctgaatacagctttaccagctactggatcggctgggtgcgcaagatgcccgggaaaggcctggagtggatggggatcatctatcttggtgactcagataccagatacagcccgtccttccaaggccaggtcaccatctcagccgacaagtccatcagtaccgcctacctgcagtggagcagcctgaaggcctcggacaccgccatgtattactgtgcgagaagtaactggggtcttgactactggggccagggaaccctggtcaccgtctctagtcagcccaaggccaaccccactgtcactctgttcccgccctcctctgaggagctccaagccaacaaggccacactagtgtgtctgatcagtgacttctacccgggagctgtgacagtggcctggaaggcagatggcagccccgtcaaggcgggagtggagaccaccaaaccctccaaacagagcaacaacaagtacgcggccaagagctacctgagcctgacgcccgagcagtggaagtcccacagaagctacagctgccaggtcacgcatgaagggagcaccgtggagaagacagtggcccctacagaatgttcagacaaaactcacacatgcccaccgtgcccagcacctgaactcctggggggaccgtcagtcttcctcttccccccaaaacccaaggacaccctcatgatctcccggacccctgaggtcacatgcgtggtggtggacgtgagccacgaagaccctgaggtcaagttcaactggtacgtggacggcgtggaggtgcataatgccaagacaaagccgtgtgaggagcagtacggcagcacgtaccgttgtgtcagcgtcctcaccgtcctgcaccaggactggctgaatggcaaggagtacaagtgcaaggtctccaacaaagccctcccagcccccatcgagaaaaccatctccaaagccaaagggcagccccgagaaccacaggtgtacaccctgcccccatcccgggaggagatgaccaagaaccaggtcagcctgacctgcctggtcaaaggcttctatcccagcgacatcgccgtggagtgggagagcaatgggcagccggagaacaactacaagaccacgcctcccgtgctggactccgacggctccttcttcctctatagcaagctcaccgtggacaagagcaggtggcagcaggggaacgtcttctcatgctccgtgatgcatgaggctctgcacaaccactacacgcagaagagcctctccctgtctccgggtggtggcggatcgggaggtggcggatcccaggtacagttgcaggagtcaggtccaggactggtgaagccctcggagaccctctcactcacctgtaccatctccggggacagtgtctctaccaacagtgttgcttggaactggattaggaagcccccagggaaaggccttgagtggataggaaggacatactacaggtccaagtggtataatgattatgcagtttctctgaaaagtcgagtaaccatcagcccagacacatccaagaaccagttctccctgaagctgagctctgtgactgccgcggacacggctgtgtattactgtgcaagagaggatggggatagctactaccgctacggtatggacgtctggggccaagggaccacggtcaccgtctcctcaactgtggctgcaccatctgtcttcatcttcccgccatctgatgagcagttgaaatctggaactgcctctgttgtgtgcctgctgaataacttctatcccagagaggccaaagtacagtggaaggtggataacgccctccaatcgggtaactcccaggagagtgtcacagagcaggacagcaaggacagcacctacagcctcgaaagcaccctgacgctgagcaaagcagactacgagaaacacaaagtctacgcctgcgaagtcacccatcagggcctgagctcgcccgtcacaaagagcttcaacaggggagagtgt

SEQ ID NO: 536 - DNA, 651 bp, synthetic construct; identical to SEQ ID NO: 447
  misc_feature 1..651: note = source = /note="Description of Artificial Sequence: Synthetic polynucleotide"
  source 1..651: mol_type = other DNA

SEQ ID NO: 537 - DNA, 645 bp, synthetic construct; identical to SEQ ID NO: 381
  misc_feature 1..645: note = source = /note="Description of Artificial Sequence: Synthetic polynucleotide"
  source 1..645: mol_type = other DNA

SEQ ID NO: 538 - protein, 687 aa, synthetic construct
  REGION 1..687: note = source = /note="Description of Artificial Sequence: Synthetic polypeptide"
EVQLVQSGAEVKKPGESLKISCKTSEYSFTSYWIGWVRKMPGKGLEWMGIIYLGDSDTRYSPSFQGQVTISADKSISTAYLQWSSLKASDTAMYYCARSNWGLDYWGQGTLVTVSSQPKANPTVTLFPPSSEELQANKATLVCLISDFYPGAVTVAWKADGSPVKAGVETTKPSKQSNNKYAAKSYLSLTPEQWKSHRSYSCQVTHEGSTVEKTVAPTECSDKTHTCPPCPAPELLGGPSVFLFPPKPKDTLMISRTPEVTCVVVDVSHEDPEVKFNWYVDGVEVHNAKTKPCEEQYGSTYRCVSVLTVLHQDWLNGKEYKCKVSNKALPAPIEKTISKAKGQPREPQVYTLPPSREEMTKNQVSLTCLVKGFYPSDIAVEWESNGQPENNYKTTPPVLDSDGSFFLYSKLTVDKSRWQQGNVFSCSVMHEALHNHYTQKSLSLSPGGGGSGGGGSQVQLQESGPGLVKPSETLSLTCTISGDSVSTNSVAWNWIRKPPGKGLEWIGRTYYRSKWYNDYAVSLKSRVTISPDTSKNQFSLKLSSVTAADTAVYYCAREDGDSYYRYGMDVWGQGTTVTVSSTVAAPSVFIFPPSDEQLKSGTASVVCLLNNFYPREAKVQWKVDNALQSGNSQESVTEQDSKDSTYSLESTLTLSKADYEKHKVYACEVTHQGLSSPVTKSFNRGEC

SEQ ID NO: 539 - protein, 217 aa, synthetic construct; identical to SEQ ID NO: 450
  REGION 1..217: note = source = /note="Description of Artificial Sequence: Synthetic polypeptide"

SEQ ID NO: 540 - protein, 215 aa, synthetic construct; identical to SEQ ID NO: 384
  REGION 1..215: note = source = /note="Description of Artificial Sequence: Synthetic polypeptide"

SEQ ID NO: 541 - DNA, 2064 bp, synthetic construct
  misc_feature 1..2064: note = source = /note="Description of Artificial Sequence: Synthetic polynucleotide"
  source 1..2064: mol_type = other DNA
caggtgcagttacagcagtcgggcgcaggactgttgaagccttcggagaccctgtccctcacctgcgctgtccatggtgggtccttcagtggttactactggaactggattcgcaagccaccagggaaggggctagagtggattggggaaatcaatcatgctggaaacaccaactacaacccgtccctcaagagtcgagtcaccatatcattagacacgtccaagaaccagttctccctgacgctgacctctgtgaccgccgcggacacggctgtgtattactgtgcgagaggatattgtagaagtaccacctgctactttgactactggggccagggaaccctagtcaccgtctcctcaacggtggctgcaccatctgtcttcatcttcccgccatctgatgagcagttgaaatctggaactgcctctgttgtgtgcctgctgaataacttctatcccagagaggccaaagtacagtggaaggtggataacgccctccaatcgggtaactcccaggagagtgtcacagagcaggacagcaaggacagcacctacagcctcaagagcaccctgacgctgagcaaagcagactacgagaaacacaaagtctacgcctgcgaagtcacccatcagggcctgagctcgcccgtcacaaagagcttcaacaggggagagtgtgacaaaactcacacatgcccaccgtgcccagcacctgaactcctggggggaccgtcagtcttcctcttccccccaaaacccaaggacaccctcatgatctcccggacccctgaggtcacatgcgtggtggtggacgtgagccacgaagaccctgaggtcaagttcaactggtacgtggacggcgtggaggtgcataatgccaagacaaagccgtgtgaggagcagtacggcagcacgtaccgttgtgtcagcgtcctcaccgtcctgcaccaggactggctgaatggcaaggagtacaagtgcaaggtctccaacaaagccctcccagcccccatcgagaaaaccatctccaaagccaaagggcagccccgagaaccacaggtgtacaccctgcccccatcccgggaggagatgaccaagaaccaggtcagcctgacctgcctggtcaaaggcttctatcccagcgacatcgccgtggagtgggagagcaatgggcagccggagaacaactacaagaccacgcctcccgtgctggactccgacggctccttcttcctctatagcaagctcaccgtggacaagagcaggtggcagcaggggaacgtcttctcatgctccgtgatgcatgaggctctgcacaaccactacacgcagaagagcctctccctgtctccgggtggtggcggatcgggaggtggcggatccgaggtacaactggtggaatcaggtggaggtttggtgcagccggggagatcgctcaggcttagctgtgcggcatcggggtttactttcgatgattatgcgatgcattgggtccggaaagcgcctggaaaagggctcgagtgggtttccgccattacgtggaatagcggacacatcgattatgcagacagtgtggagggcagattcacaatctcacgagacaatgctaagaacagcctgtaccttcagatgaactcacttcgcgcggaagataccgccgtatactactgcgccaaagtctcctacttgtctacagcttcgtcgctcgactattggggtcaaggaacgttggtcaccgtctctagtactgtggctgcaccatctgtcttcatcttcccgccatctgatgagcagttgaaatctggaactgcctctgttgtgtgcctgctgaataacttctatcccagagaggccaaagtacagtggaaggtggataacgccctccaatcgggtaactcccaggagagtgtcacagagcaggacagcaaggacagcacctacagcctcgaaagcaccctgacgctgagcaaagcagactacgagaaacacaaagtctacgcctgcgaagtcacccatcagggcctgagctcgcccgtcacaaagagcttcaacaggggagagtgt

SEQ ID NO: 542 - DNA, 633 bp, synthetic construct; identical to SEQ ID NO: 471
  misc_feature 1..633: note = source = /note="Description of Artificial Sequence: Synthetic polynucleotide"
  source 1..633: mol_type = other DNA

SEQ ID NO: 543 - DNA, 633 bp, synthetic construct; identical to SEQ ID NO: 399
  misc_feature 1..633: note = source = /note="Description of Artificial Sequence: Synthetic polynucleotide"
  source 1..633: mol_type = other DNA

SEQ ID NO: 544 - protein, 688 aa, synthetic construct
  REGION 1..688: note = source = /note="Description of Artificial Sequence: Synthetic polypeptide"
QVQLQQSGAGLLKPSETLSLTCAVHGGSFSGYYWNWIRKPPGKGLEWIGEINHAGNTNYNPSLKSRVTISLDTSKNQFSLTLTSVTAADTAVYYCARGYCRSTTCYFDYWGQGTLVTVSSTVAAPSVFIFPPSDEQLKSGTASVVCLLNNFYPREAKVQWKVDNALQSGNSQESVTEQDSKDSTYSLKSTLTLSKADYEKHKVYACEVTHQGLSSPVTKSFNRGECDKTHTCPPCPAPELLGGPSVFLFPPKPKDTLMISRTPEVTCVVVDVSHEDPEVKFNWYVDGVEVHNAKTKPCEEQYGSTYRCVSVLTVLHQDWLNGKEYKCKVSNKALPAPIEKTISKAKGQPREPQVYTLPPSREEMTKNQVSLTCLVKGFYPSDIAVEWESNGQPENNYKTTPPVLDSDGSFFLYSKLTVDKSRWQQGNVFSCSVMHEALHNHYTQKSLSLSPGGGGSGGGGSEVQLVESGGGLVQPGRSLRLSCAASGFTFDDYAMHWVRKAPGKGLEWVSAITWNSGHIDYADSVEGRFTISRDNAKNSLYLQMNSLRAEDTAVYYCAKVSYLSTASSLDYWGQGTLVTVSSTVAAPSVFIFPPSDEQLKSGTASVVCLLNNFYPREAKVQWKVDNALQSGNSQESVTEQDSKDSTYSLESTLTLSKADYEKHKVYACEVTHQGLSSPVTKSFNRGEC

SEQ ID NO: 545 - protein, 211 aa, synthetic construct; identical to SEQ ID NO: 474
  REGION 1..211: note = source = /note="Description of Artificial Sequence: Synthetic polypeptide"

SEQ ID NO: 546 - protein, 211 aa, synthetic construct; identical to SEQ ID NO: 402
  REGION 1..211: note = source = /note="Description of Artificial Sequence: Synthetic polypeptide"

SEQ ID NO: 547 - DNA, 2046 bp, synthetic construct
  misc_feature 1..2046: note = source = /note="Description of Artificial Sequence: Synthetic polynucleotide"
  source 1..2046: mol_type = other DNA
caggtgcagttacagcagtcgggcgcaggactgttgaagccttcggagaccctgtccctcacctgcgctgtccatggtgggtccttcagtggttactactggaactggattcgcaagccaccagggaaggggctagagtggattggggaaatcaatcatgctggaaacaccaactacaacccgtccctcaagagtcgagtcaccatatcattagacacgtccaagaaccagttctccctgacgctgacctctgtgaccgccgcggacacggctgtgtattactgtgcgagaggatattgtagaagtaccacctgctactttgactactggggccagggaaccctagtcaccgtctcctcaacggtggctgcaccatctgtcttcatcttcccgccatctgatgagcagttgaaatctggaactgcctctgttgtgtgcctgctgaataacttctatcccagagaggccaaagtacagtggaaggtggataacgccctccaatcgggtaactcccaggagagtgtcacagagcaggacagcaaggacagcacctacagcctcaagagcaccctgacgctgagcaaagcagactacgagaaacacaaagtctacgcctgcgaagtcacccatcagggcctgagctcgcccgtcacaaagagcttcaacaggggagagtgtgacaaaactcacacatgcccaccgtgcccagcacctgaactcctggggggaccgtcagtcttcctcttccccccaaaacccaaggacaccctcatgatctcccggacccctgaggtcacatgcgtggtggtggacgtgagccacgaagaccctgaggtcaagttcaactggtacgtggacggcgtggaggtgcataatgccaagacaaagccgtgtgaggagcagtacggcagcacgtaccgttgtgtcagcgtcctcaccgtcctgcaccaggactggctgaatggcaaggagtacaagtgcaaggtctccaacaaagccctcccagcccccatcgagaaaaccatctccaaagccaaagggcagccccgagaaccacaggtgtacaccctgcccccatcccgggaggagatgaccaagaaccaggtcagcctgacctgcctggtcaaaggcttctatcccagcgacatcgccgtggagtgggagagcaatgggcagccggagaacaactacaagaccacgcctcccgtgctggactccgacggctccttcttcctctatagcaagctcaccgtggacaagagcaggtggcagcaggggaacgtcttctcatgctccgtgatgcatgaggctctgcacaaccactacacgcagaagagcctctccctgtctccgggtggtggcggatcgggaggtggcggatccgaggtgcagctggtgcagtctggagcagaggtgaaaaagcccggggagtctctgaagatctcctgtaagacttctgaatacagctttaccagctactggatcggctgggtgcgcaagatgcccgggaaaggcctggagtggatggggatcatctatcttggtgactcagataccagatacagcccgtccttccaaggccaggtcaccatctcagccgacaagtccatcagtaccgcctacctgcagtggagcagcctgaaggcctcggacaccgccatgtattactgtgcgagaagtaactggggtcttgactactggggccagggaaccctggtcaccgtctctagtcagcccaaggccaaccccactgtcactctgttcccgccctcctctgaggagctccaagccaacaaggccacactagtgtgtctgatcagtgacttctacccgggagctgtgacagtggcctggaaggcagatggcagccccgtcaaggcgggagtggagaccaccaaaccctccaaacagagcaacaacaagtacgcggccgagagctacctgagcctgacgcccgagcagtggaagtcccacagaagctacagctgccaggtcacgcatgaagggagcaccgtggagaagacagtggcccctacagaatgttca

SEQ ID NO: 548 - DNA, 645 bp, synthetic construct; identical to SEQ ID NO: 477
  misc_feature 1..645: note = source = /note="Description of Artificial Sequence: Synthetic polynucleotide"
  source 1..645: mol_type = other DNA

SEQ ID NO: 549 - DNA, 633 bp, synthetic construct; identical to SEQ ID NO: 399
  misc_feature 1..633: note = source = /note="Description of Artificial Sequence: Synthetic polynucleotide"
  source 1..633: mol_type = other DNA

SEQ ID NO: 550 - protein, 682 aa, synthetic construct
  REGION 1..682: note = source = /note="Description of Artificial Sequence: Synthetic polypeptide"
QVQLQQSGAGLLKPSETLSLTCAVHGGSFSGYYWNWIRKPPGKGLEWIGEINHAGNTNYNPSLKSRVTISLDTSKNQFSLTLTSVTAADTAVYYCARGYCRSTTCYFDYWGQGTLVTVSSTVAAPSVFIFPPSDEQLKSGTASVVCLLNNFYPREAKVQWKVDNALQSGNSQESVTEQDSKDSTYSLKSTLTLSKADYEKHKVYACEVTHQGLSSPVTKSFNRGECDKTHTCPPCPAPELLGGPSVFLFPPKPKDTLMISRTPEVTCVVVDVSHEDPEVKFNWYVDGVEVHNAKTKPCEEQYGSTYRCVSVLTVLHQDWLNGKEYKCKVSNKALPAPIEKTISKAKGQPREPQVYTLPPSREEMTKNQVSLTCLVKGFYPSDIAVEWESNGQPENNYKTTPPVLDSDGSFFLYSKLTVDKSRWQQGNVFSCSVMHEALHNHYTQKSLSLSPGGGGSGGGGSEVQLVQSGAEVKKPGESLKISCKTSEYSFTSYWIGWVRKMPGKGLEWMGIIYLGDSDTRYSPSFQGQVTISADKSISTAYLQWSSLKASDTAMYYCARSNWGLDYWGQGTLVTVSSQPKANPTVTLFPPSSEELQANKATLVCLISDFYPGAVTVAWKADGSPVKAGVETTKPSKQSNNKYAAESYLSLTPEQWKSHRSYSCQVTHEGSTVEKTVAPTECS

SEQ ID NO: 551 - protein, 215 aa, synthetic construct; identical to SEQ ID NO: 480
  REGION 1..215: note = source = /note="Description of Artificial Sequence: Synthetic polypeptide"

SEQ ID NO: 552 - protein, 211 aa, synthetic construct; identical to SEQ ID NO: 402
  REGION 1..211: note = source = /note="Description of Artificial Sequence: Synthetic polypeptide"

SEQ ID NO: 553 - DNA, 2058 bp, synthetic construct
  misc_feature 1..2058: note = source = /note="Description of Artificial Sequence: Synthetic polynucleotide"
  source 1..2058: mol_type = other DNA
caggtgcagctgcaggagtcgggcccaggactggtgaagccttcggagaccctgtccctcacctgcactgtctctggtggctccatcagtagttacttctggagctggattcggaagcccccaggtaagggactggagtggattggctatatctattacagtgggcagaccaaatacaacccctccctcaagagtcgagtcaccatatcaatagacacgtccaagaaccagttctccctgaagctgagctctgtgaccgctgcggacacggccgtgtattactgtgcgagagaaactgggagctactacggctttgactactggggccagggaaccctggtcaccgtctcctcaacggtggctgcaccatctgtcttcatcttcccgccatctgatgagcagttgaaatctggaactgcctctgttgtgtgcctgctgaataacttctatcccagagaggccaaagtacagtggaaggtggataacgccctccaatcgggtaactcccaggagagtgtcacagagcaggacagcaaggacagcacctacagcctcaagagcaccctgacgctgagcaaagcagactacgagaaacacaaagtctacgcctgcgaagtcacccatcagggcctgagctcgcccgtcacaaagagcttcaacaggggagagtgtgacaaaactcacacatgcccaccgtgcccagcacctgaactcctggggggaccgtcagtcttcctcttccccccaaaacccaaggacaccctcatgatctcccggacccctgaggtcacatgcgtggtggtggacgtgagccacgaagaccctgaggtcaagttcaactggtacgtggacggcgtggaggtgcataatgccaagacaaagccgtgtgaggagcagtacggcagcacgtaccgttgtgtcagcgtcctcaccgtcctgcaccaggactggctgaatggcaaggagtacaagtgcaaggtctccaacaaagccctcccagcccccatcgagaaaaccatctccaaagccaaagggcagccccgagaaccacaggtgtacaccctgcccccatcccgggaggagatgaccaagaaccaggtcagcctgacctgcctggtcaaaggcttctatcccagcgacatcgccgtggagtgggagagcaatgggcagccggagaacaactacaagaccacgcctcccgtgctggactccgacggctccttcttcctctatagcaagctcaccgtggacaagagcaggtggcagcaggggaacgtcttctcatgctccgtgatgcatgaggctctgcacaaccactacacgcagaagagcctctccctgtctccgggtggtggcggatcgggaggtggcggatccgaggtacaactggtggaatcaggtggaggtttggtgcagccggggagatcgctcaggcttagctgtgcggcatcggggtttactttcgatgattatgcgatgcattgggtccggaaagcgcctggaaaagggctcgagtgggtttccgccattacgtggaatagcggacacatcgattatgcagacagtgtggagggcagattcacaatctcacgagacaatgctaagaacagcctgtaccttcagatgaactcacttcgcgcggaagataccgccgtatactactgcgccaaagtctcctacttgtctacagcttcgtcgctcgactattggggtcaaggaacgttggtcaccgtctctagtactgtggctgcaccatctgtcttcatcttcccgccatctgatgagcagttgaaatctggaactgcctctgttgtgtgcctgctgaataacttctatcccagagaggccaaagtacagtggaaggtggataacgccctccaatcgggtaactcccaggagagtgtcacagagcaggacagcaaggacagcacctacagcctcgaaagcaccctgacgctgagcaaagcagactacgagaaacacaaagtctacgcctgcgaagtcacccatcagggcctgagctcgcccgtcacaaagagcttcaacaggggagagtgt

SEQ ID NO: 554 - DNA, 633 bp, synthetic construct; identical to SEQ ID NO: 471
  misc_feature 1..633: note = source = /note="Description of Artificial Sequence: Synthetic polynucleotide"
  source 1..633: mol_type = other DNA

SEQ ID NO: 555 - DNA, 633 bp, synthetic construct; identical to SEQ ID NO: 411
  misc_feature 1..633: note = source = /note="Description of Artificial Sequence: Synthetic polynucleotide"
  source 1..633: mol_type = other DNA

SEQ ID NO: 556 - protein, 686 aa, synthetic construct
  REGION 1..686: note = source = /note="Description of Artificial Sequence: Synthetic polypeptide"
QVQLQESGPGLVKPSETLSLTCTVSGGSISSYFWSWIRKPPGKGLEWIGYIYYSGQTKYNPSLKSRVTISIDTSKNQFSLKLSSVTAADTAVYYCARETGSYYGFDYWGQGTLVTVSSTVAAPSVFIFPPSDEQLKSGTASVVCLLNNFYPREAKVQWKVDNALQSGNSQESVTEQDSKDSTYSLKSTLTLSKADYEKHKVYACEVTHQGLSSPVTKSFNRGECDKTHTCPPCPAPELLGGPSVFLFPPKPKDTLMISRTPEVTCVVVDVSHEDPEVKFNWYVDGVEVHNAKTKPCEEQYGSTYRCVSVLTVLHQDWLNGKEYKCKVSNKALPAPIEKTISKAKGQPREPQVYTLPPSREEMTKNQVSLTCLVKGFYPSDIAVEWESNGQPENNYKTTPPVLDSDGSFFLYSKLTVDKSRWQQGNVFSCSVMHEALHNHYTQKSLSLSPGGGGSGGGGSEVQLVESGGGLVQPGRSLRLSCAASGFTFDDYAMHWVRKAPGKGLEWVSAITWNSGHIDYADSVEGRFTISRDNAKNSLYLQMNSLRAEDTAVYYCAKVSYLSTASSLDYWGQGTLVTVSSTVAAPSVFIFPPSDEQLKSGTASVVCLLNNFYPREAKVQWKVDNALQSGNSQESVTEQDSKDSTYSLESTLTLSKADYEKHKVYACEVTHQGLSSPVTKSFNRGEC

SEQ ID NO: 557 - protein, 211 aa, synthetic construct; identical to SEQ ID NO: 474
  REGION 1..211: note = source = /note="Description of Artificial Sequence: Synthetic polypeptide"

SEQ ID NO: 558 - protein, 211 aa, synthetic construct; identical to SEQ ID NO: 414
  REGION 1..211: note = source = /note="Description of Artificial Sequence: Synthetic polypeptide"

SEQ ID NO: 559 - DNA, 2040 bp, synthetic construct
  misc_feature 1..2040: note = source = /note="Description of Artificial Sequence: Synthetic polynucleotide"
  source 1..2040: mol_type = other DNA
caggtgcagctgcaggagtcgggcccaggactggtgaagccttcggagaccctgtccctcacctgcactgtctctggtggctccatcagtagttacttctggagctggattcggaagcccccaggtaagggactggagtggattggctatatctattacagtgggcagaccaaatacaacccctccctcaagagtcgagtcaccatatcaatagacacgtccaagaaccagttctccctgaagctgagctctgtgaccgctgcggacacggccgtgtattactgtgcgagagaaactgggagctactacggctttgactactggggccagggaaccctggtcaccgtctcctcaacggtggctgcaccatctgtcttcatcttcccgccatctgatgagcagttgaaatctggaactgcctctgttgtgtgcctgctgaataacttctatcccagagaggccaaagtacagtggaaggtggataacgccctccaatcgggtaactcccaggagagtgtcacagagcaggacagcaaggacagcacctacagcctcaagagcaccctgacgctgagcaaagcagactacgagaaacacaaagtctacgcctgcgaagtcacccatcagggcctgagctcgcccgtcacaaagagcttcaacaggggagagtgtgacaaaactcacacatgcccaccgtgcccagcacctgaactcctggggggaccgtcagtcttcctcttccccccaaaacccaaggacaccctcatgatctcccggacccctgaggtcacatgcgtggtggtggacgtgagccacgaagaccctgaggtcaagttcaactggtacgtggacggcgtggaggtgcataatgccaagacaaagccgtgtgaggagcagtacggcagcacgtaccgttgtgtcagcgtcctcaccgtcctgcaccaggactggctgaatggcaaggagtacaagtgcaaggtctccaacaaagccctcccagcccccatcgagaaaaccatctccaaagccaaagggcagccccgagaaccacaggtgtacaccctgcccccatcccgggaggagatgaccaagaaccaggtcagcctgacctgcctggtcaaaggcttctatcccagcgacatcgccgtggagtgggagagcaatgggcagccggagaacaactacaagaccacgcctcccgtgctggactccgacggctccttcttcctctatagcaagctcaccgtggacaagagcaggtggcagcaggggaacgtcttctcatgctccgtgatgcatgaggctctgcacaaccactacacgcagaagagcctctccctgtctccgggtggtggcggatcgggaggtggcggatccgaggtgcagctggtgcagtctggagcagaggtgaaaaagcccggggagtctctgaagatctcctgtaagacttctgaatacagctttaccagctactggatcggctgggtgcgcaagatgcccgggaaaggcctggagtggatggggatcatctatcttggtgactcagataccagatacagcccgtccttccaaggccaggtcaccatctcagccgacaagtccatcagtaccgcctacctgcagtggagcagcctgaaggcctcggacaccgccatgtattactgtgcgagaagtaactggggtcttgactactggggccagggaaccctggtcaccgtctctagtcagcccaaggccaaccccactgtcactctgttcccgccctcctctgaggagctccaagccaacaaggccacactagtgtgtctgatcagtgacttctacccgggagctgtgacagtggcctggaaggcagatggcagccccgtcaaggcgggagtggagaccaccaaaccctccaaacagagcaacaacaagtacgcggccgagagctacctgagcctgacgcccgagcagtggaagtcccacagaagctacagctgccaggtcacgcatgaagggagcaccgtggagaagacagtggcccctacagaatgttca

SEQ ID NO: 560 - DNA, 645 bp, synthetic construct; identical to SEQ ID NO: 477
  misc_feature 1..645: note = source = /note="Description of Artificial Sequence: Synthetic polynucleotide"
  source 1..645: mol_type = other DNA

SEQ ID NO: 561 - DNA, 633 bp, synthetic construct; identical to SEQ ID NO: 411
  misc_feature 1..633: note = source = /note="Description of Artificial Sequence: Synthetic polynucleotide"
  source 1..633: mol_type = other DNA

SEQ ID NO: 562 - protein, 680 aa, synthetic construct
  REGION 1..680: note = source = /note="Description of Artificial Sequence: Synthetic polypeptide"
QVQLQESGPGLVKPSETLSLTCTVSGGSISSYFWSWIRKPPGKGLEWIGYIYYSGQTKYNPSLKSRVTISIDTSKNQFSLKLSSVTAADTAVYYCARETGSYYGFDYWGQGTLVTVSSTVAAPSVFIFPPSDEQLKSGTASVVCLLNNFYPREAKVQWKVDNALQSGNSQESVTEQDSKDSTYSLKSTLTLSKADYEKHKVYACEVTHQGLSSPVTKSFNRGECDKTHTCPPCPAPELLGGPSVFLFPPKPKDTLMISRTPEVTCVVVDVSHEDPEVKFNWYVDGVEVHNAKTKPCEEQYGSTYRCVSVLTVLHQDWLNGKEYKCKVSNKALPAPIEKTISKAKGQPREPQVYTLPPSREEMTKNQVSLTCLVKGFYPSDIAVEWESNGQPENNYKTTPPVLDSDGSFFLYSKLTVDKSRWQQGNVFSCSVMHEALHNHYTQKSLSLSPGGGGSGGGGSEVQLVQSGAEVKKPGESLKISCKTSEYSFTSYWIGWVRKMPGKGLEWMGIIYLGDSDTRYSPSFQGQVTISADKSISTAYLQWSSLKASDTAMYYCARSNWGLDYWGQGTLVTVSSQPKANPTVTLFPPSSEELQANKATLVCLISDFYPGAVTVAWKADGSPVKAGVETTKPSKQSNNKYAAESYLSLTPEQWKSHRSYSCQVTHEGSTVEKTVAPTECS

SEQ ID NO: 563 - protein, 215 aa, synthetic construct; identical to SEQ ID NO: 480
  REGION 1..215: note = source = /note="Description of Artificial Sequence: Synthetic polypeptide"

SEQ ID NO: 564 - protein, 211 aa, synthetic construct; identical to SEQ ID NO: 414
  REGION 1..211: note = source = /note="Description of Artificial Sequence: Synthetic polypeptide"

SEQ ID NO: 565 - DNA, 2079 bp, synthetic construct
  misc_feature 1..2079: note = source = /note="Description of Artificial Sequence: Synthetic polynucleotide"
  source 1..2079: mol_type = other DNA
caggtacagttgcaggagtcaggtccaggactggtgaagccctcggagaccctctcactcacctgtaccatctccggggacagtgtctctaccaacagtgttgcttggaactggattaggaagcccccagggaaaggccttgagtggataggaaggacatactacaggtccaagtggtataatgattatgcagtttctctgaaaagtcgagtaaccatcagcccagacacatccaagaaccagttctccctgaagctgagctctgtgactgccgcggacacggctgtgtattactgtgcaagagaggatggggatagctactaccgctacggtatggacgtctggggccaagggaccacggtcaccgtctcctcaacggtggctgcaccatctgtcttcatcttcccgccatctgatgagcagttgaaatctggaactgcctctgttgtgtgcctgctgaataacttctatcccagagaggccaaagtacagtggaaggtggataacgccctccaatcgggtaactcccaggagagtgtcacagagcaggacagcaaggacagcacctacagcctcaagagcaccctgacgctgagcaaagcagactacgagaaacacaaagtctacgcctgcgaagtcacccatcagggcctgagctcgcccgtcacaaagagcttcaacaggggagagtgtgacaaaactcacacatgcccaccgtgcccagcacctgaactcctggggggaccgtcagtcttcctcttccccccaaaacccaaggacaccctcatgatctcccggacccctgaggtcacatgcgtggtggtggacgtgagccacgaagaccctgaggtcaagttcaactggtacgtggacggcgtggaggtgcataatgccaagacaaagccgtgtgaggagcagtacggcagcacgtaccgttgtgtcagcgtcctcaccgtcctgcaccaggactggctgaatggcaaggagtacaagtgcaaggtctccaacaaagccctcccagcccccatcgagaaaaccatctccaaagccaaagggcagccccgagaaccacaggtgtacaccctgcccccatcccgggaggagatgaccaagaaccaggtcagcctgacctgcctggtcaaaggcttctatcccagcgacatcgccgtggagtgggagagcaatgggcagccggagaacaactacaagaccacgcctcccgtgctggactccgacggctccttcttcctctatagcaagctcaccgtggacaagagcaggtggcagcaggggaacgtcttctcatgctccgtgatgcatgaggctctgcacaaccactacacgcagaagagcctctccctgtctccgggtggtggcggatcgggaggtggcggatccgaggtacaactggtggaatcaggtggaggtttggtgcagccggggagatcgctcaggcttagctgtgcggcatcggggtttactttcgatgattatgcgatgcattgggtccggaaagcgcctggaaaagggctcgagtgggtttccgccattacgtggaatagcggacacatcgattatgcagacagtgtggagggcagattcacaatctcacgagacaatgctaagaacagcctgtaccttcagatgaactcacttcgcgcggaagataccgccgtatactactgcgccaaagtctcctacttgtctacagcttcgtcgctcgactattggggtcaaggaacgttggtcaccgtctctagtactgtggctgcaccatctgtcttcatcttcccgccatctgatgagcagttgaaatctggaactgcctctgttgtgtgcctgctgaataacttctatcccagagaggccaaagtacagtggaaggtggataacgccctccaatcgggtaactcccaggagagtgtcacagagcaggacagcaaggacagcacctacagcctcgaaagcaccctgacgctgagcaaagcagactacgagaaacacaaagtctacgcctgcgaagtcacccatcagggcctgagctcgcccgtcacaaagagcttcaacaggggagagtgt

SEQ ID NO: 566 - DNA, 633 bp, synthetic construct; identical to SEQ ID NO: 471
  misc_feature 1..633: note = source = /note="Description of Artificial Sequence: Synthetic polynucleotide"
  source 1..633: mol_type = other DNA

SEQ ID NO: 567 - DNA, 651 bp, synthetic construct; identical to SEQ ID NO: 423
  misc_feature 1..651: note = source = /note="Description of Artificial Sequence: Synthetic polynucleotide"
  source 1..651: mol_type = other DNA

SEQ ID NO: 568 - protein, 693 aa, synthetic construct
  REGION 1..693: note = source = /note="Description of Artificial Sequence: Synthetic polypeptide"
QVQLQESGPGLVKPSETLSLTCTISGDSVSTNSVAWNWIRKPPGKGLEWIGRTYYRSKWYNDYAVSLKSRVTISPDTSKNQFSLKLSSVTAADTAVYYCAREDGDSYYRYGMDVWGQGTTVTVSSTVAAPSVFIFPPSDEQLKSGTASVVCLLNNFYPREAKVQWKVDNALQSGNSQESVTEQDSKDSTYSLKSTLTLSKADYEKHKVYACEVTHQGLSSPVTKSFNRGECDKTHTCPPCPAPELLGGPSVFLFPPKPKDTLMISRTPEVTCVVVDVSHEDPEVKFNWYVDGVEVHNAKTKPCEEQYGSTYRCVSVLTVLHQDWLNGKEYKCKVSNKALPAPIEKTISKAKGQPREPQVYTLPPSREEMTKNQVSLTCLVKGFYPSDIAVEWESNGQPENNYKTTPPVLDSDGSFFLYSKLTVDKSRWQQGNVFSCSVMHEALHNHYTQKSLSLSPGGGGSGGGGSEVQLVESGGGLVQPGRSLRLSCAASGFTFDDYAMHWVRKAPGKGLEWVSAITWNSGHIDYADSVEGRFTISRDNAKNSLYLQMNSLRAEDTAVYYCAKVSYLSTASSLDYWGQGTLVTVSSTVAAPSVFIFPPSDEQLKSGTASVVCLLNNFYPREAKVQWKVDNALQSGNSQESVTEQDSKDSTYSLESTLTLSKADYEKHKVYACEVTHQGLSSPVTKSFNRGEC

SEQ ID NO: 569 - protein, 211 aa, synthetic construct; identical to SEQ ID NO: 474
  REGION 1..211: note = source = /note="Description of Artificial Sequence: Synthetic polypeptide"

SEQ ID NO: 570 - protein, 217 aa, synthetic construct; identical to SEQ ID NO: 426
  REGION 1..217: note = source = /note="Description of Artificial Sequence: Synthetic polypeptide"

SEQ ID NO: 571 - DNA, 2061 bp, synthetic construct
  misc_feature 1..2061: note = source = /note="Description of Artificial Sequence: Synthetic polynucleotide"
  source 1..2061: mol_type = other DNA
caggtacagttgcaggagtcaggtccaggactggtgaagccctcggagaccctctcactcacctgtaccatctccggggacagtgtctctaccaacagtgttgcttggaactggattaggaagcccccagggaaaggccttgagtggataggaaggacatactacaggtccaagtggtataatgattatgcagtttctctgaaaagtcgagtaaccatcagcccagacacatccaagaaccagttctccctgaagctgagctctgtgactgccgcggacacggctgtgtattactgtgcaagagaggatggggatagctactaccgctacggtatggacgtctggggccaagggaccacggtcaccgtctcctcaacggtggctgcaccatctgtcttcatcttcccgccatctgatgagcagttgaaatctggaactgcctctgttgtgtgcctgctgaataacttctatcccagagaggccaaagtacagtggaaggtggataacgccctccaatcgggtaactcccaggagagtgtcacagagcaggacagcaaggacagcacctacagcctcaagagcaccctgacgctgagcaaagcagactacgagaaacacaaagtctacgcctgcgaagtcacccatcagggcctgagctcgcccgtcacaaagagcttcaacaggggagagtgtgacaaaactcacacatgcccaccgtgcccagcacctgaactcctggggggaccgtcagtcttcctcttccccccaaaacccaaggacaccctcatgatctcccggacccctgaggtcacatgcgtggtggtggacgtgagccacgaagaccctgaggtcaagttcaactggtacgtggacggcgtggaggtgcataatgccaagacaaagccgtgtgaggagcagtacggcagcacgtaccgttgtgtcagcgtcctcaccgtcctgcaccaggactggctgaatggcaaggagtacaagtgcaaggtctccaacaaagccctcccagcccccatcgagaaaaccatctccaaagccaaagggcagccccgagaaccacaggtgtacaccctgcccccatcccgggaggagatgaccaagaaccaggtcagcctgacctgcctggtcaaaggcttctatcccagcgacatcgccgtggagtgggagagcaatgggcagccggagaacaactacaagaccacgcctcccgtgctggactccgacggctccttcttcctctatagcaagctcaccgtggacaagagcaggtggcagcaggggaacgtcttctcatgctccgtgatgcatgaggctctgcacaaccactacacgcagaagagcctctccctgtctccgggtggtggcggatcgggaggtggcggatccgaggtgcagctggtgcagtctggagcagaggtgaaaaagcccggggagtctctgaagatctcctgtaagacttctgaatacagctttaccagctactggatcggctgggtgcgcaagatgcccgggaaaggcctggagtggatggggatcatctatcttggtgactcagataccagatacagcccgtccttccaaggccaggtcaccatctcagccgacaagtccatcagtaccgcctacctgcagtggagcagcctgaaggcctcggacaccgccatgtattactgtgcgagaagtaactggggtcttgactactggggccagggaaccctggtcaccgtctctagtcagcccaaggccaaccccactgtcactctgttcccgccctcctctgaggagctccaagccaacaaggccacactagtgtgtctgatcagtgacttctacccgggagctgtgacagtggcctggaaggcagatggcagccccgtcaaggcgggagtggagaccaccaaaccctccaaacagagcaacaacaagtacgcggccgagagctacctgagcctgacgcccgagcagtggaagtcccacagaagctacagctgccaggtcacgcatgaagggagcaccgtggagaagacagtggcccctacagaatgttca

SEQ ID NO: 572 - DNA, 645 bp, synthetic construct; identical to SEQ ID NO: 477
  misc_feature 1..645: note = source = /note="Description of Artificial Sequence: Synthetic polynucleotide"
  source 1..645: mol_type = other DNA

SEQ ID NO: 573 - DNA, 651 bp, synthetic construct; identical to SEQ ID NO: 423
  misc_feature 1..651: note = source = /note="Description of Artificial Sequence: Synthetic polynucleotide"
  source 1..651: mol_type = other DNA

SEQ ID NO: 574 - protein, 687 aa, synthetic construct
  REGION 1..687: note = source = /note="Description of Artificial Sequence: Synthetic polypeptide"
QVQLQESGPGLVKPSETLSLTCTISGDSVSTNSVAWNWIRKPPGKGLEWIGRTYYRSKWYNDYAVSLKSRVTISPDTSKNQFSLKLSSVTAADTAVYYCAREDGDSYYRYGMDVWGQGTTVTVSSTVAAPSVFIFPPSDEQLKSGTASVVCLLNNFYPREAKVQWKVDNALQSGNSQESVTEQDSKDSTYSLKSTLTLSKADYEKHKVYACEVTHQGLSSPVTKSFNRGECDKTHTCPPCPAPELLGGPSVFLFPPKPKDTLMISRTPEVTCVVVDVSHEDPEVKFNWYVDGVEVHNAKTKPCEEQYGSTYRCVSVLTVLHQDWLNGKEYKCKVSNKALPAPIEKTISKAKGQPREPQVYTLPPSREEMTKNQVSLTCLVKGFYPSDIAVEWESNGQPENNYKTTPPVLDSDGSFFLYSKLTVDKSRWQQGNVFSCSVMHEALHNHYTQKSLSLSPGGGGSGGGGSEVQLVQSGAEVKKPGESLKISCKTSEYSFTSYWIGWVRKMPGKGLEWMGIIYLGDSDTRYSPSFQGQVTISADKSISTAYLQWSSLKASDTAMYYCARSNWGLDYWGQGTLVTVSSQPKANPTVTLFPPSSEELQANKATLVCLISDFYPGAVTVAWKADGSPVKAGVETTKPSKQSNNKYAAESYLSLTPEQWKSHRSYSCQVTHEGSTVEKTVAPTECS

SEQ ID NO: 575 - protein, 215 aa, synthetic construct; identical to SEQ ID NO: 480
  REGION 1..215: note = source = /note="Description of Artificial Sequence: Synthetic polypeptide"

SEQ ID NO: 576 - protein, 217 aa, synthetic construct; identical to SEQ ID NO: 426
  REGION 1..217: note = source = /note="Description of Artificial Sequence: Synthetic polypeptide"

SEQ ID NO: 577 - DNA, 642 bp, synthetic construct
  misc_feature 1..642: note = source = /note="Description of Artificial Sequence: Synthetic polynucleotide"
  source 1..642: mol_type = other DNA
gatatccaaatgacacaatcaccatcgtcgctttcagcgtctgttggcgaccgtgtgacgattacctgtcgcgcgtcccagggaatccggaattacctcgcatggtatcagcaaaaacccggaaaagcaccgaagctcctgatctatgccgcctcgactcttcagagtggtgtgccgtcgaggtttagcgggtccgggtcaggtacggactttactctcacaatttccagcctgcagcccgaagatgtagctacctattactgccagagatacaaccgagcgccttacacattcggagaagggacaaaagtcgagatcaagcgtacggtggctgcaccatctgtcttcatcttcccgccatctgatgagcagttgaaatctggaactgcctctgttgtgtgcctgctgaataacttctatcccagagaggccaaagtacagtggaaggtggataacgccctccaatcgggtaactcccaggagagtgtcacagagcaggacagcaaggacagcacctacagcctcgaaagcaccctgacgctgagcaaagcagactacgagaaacacaaagtctacgcctgcgaagtcacccatcagggcctgagctcgcccgtcacaaagagcttcaacaggggagagtgt

SEQ ID NO: 578 - DNA, 642 bp, synthetic construct
  misc_feature 1..642: note = source = /note="Description of Artificial Sequence: Synthetic polynucleotide"
  source 1..642: mol_type = other DNA
gaaattgtgttgacgcagtctccaggcaccctgtctttgtctccaggggaaagagccaccctctcctgcagggccagtcagagtgttagaagcagttacttagcctggtaccagcagaaacctggccaggagcccaggctcctcatctatggtgcatccagcagggccactggcatcccagacaggttcagtggcagtgggtctgggacagacttcactctcaccatcagcagactggagcctgaagattttgcagtgtattactgtcagcagtatggtagctcacctaccttcggccaagggacacgactggagattaaacgaacggtggctgcaccatctgtcttcatcttcccgccatctgatgagcagttgaaatctggtaccgcctctgttgtgtgcctgctgaataacttctatcccagagaggccaaagtacagtggaaggtggataacgccctccaatcgggtaactcccaggagagtgtcacagagcaggacagcaaggacagcacctacagcctcaagagcaccctgacgctgagcaaagcagactacgagaaacacaaagtctacgcctgcgaagtcacccatcagggcctgagctcgcccgtcacaaagagcttcaacaggggagagtgt

SEQ ID NO: 579 - DNA, 2046 bp, synthetic construct
  misc_feature 1..2046: note = source = /note="Description of Artificial Sequence: Synthetic polynucleotide"
  source 1..2046: mol_type = other DNA
gaggtacaactggtggaatcaggtggaggtttggtgcagccggggagatcgctcaggcttagctgtgcggcatcggggtttactttcgatgattatgcgatgcattgggtccggcaagcgcctggaaaaaagctcgagtgggtttccgccattacgtggaatagcggacacatcgattatgcagacagtgtggagggcagattcacaatctcacgagacaatgctaagaacagcctgtaccttcagatgaactcacttcgcgcggaagataccgccgtatactactgcgccaaagtctcctacttgtctacagcttcgtcgctcgactattggggtcaaggaacgttggtcaccgtctctagtgcctccaccaagggcccatcggtcttccccctggcaccctcctccaagagcacctctgggggcacagcggccctgggctgcctggtcaaggactacttccccgaaccggtgacggtgtcgtggaactcaggcgccctgaccagcggcgtgcacaccttcccggctgtcctacagtcctcaggactctactccctcaaaagcgtggtgaccgtgccctccagcagcttgggcacccagacctacatctgcaacgtgaatcacaagcccagcaacaccaaggtggacaagaaagttgagcccaaatcttgtgacaaaactcacacatgcccaccgtgcccagcacctgaactcctggggggaccgtcagtcttcctcttccccccaaaacccaaggacaccctcatgatctcccggacccctgaggtcacatgcgtggtggtggacgtgagccacgaagaccctgaggtcaagttcaactggtacgtggacggcgtggaggtgcataatgccaagacaaagccgtgtgaggagcagtacggcagcacgtaccgttgtgtcagcgtcctcaccgtcctgcaccaggactggctgaatggcaaggagtacaagtgcaaggtctccaacaaagccctcccagcccccatcgagaaaaccatctccaaagccaaagggcagccccgagaaccacaggtgtacaccctgcccccatcccgggaggagatgaccaagaaccaggtcagcctgacctgcctggtcaaaggcttctatcccagcgacatcgccgtggagtgggagagcaatgggcagccggagaacaactacaagaccacgcctcccgtgctggactccgacggctccttcttcctctatagcaagctcaccgtggacaagagcaggtggcagcaggggaacgtcttctcatgctccgtgatgcatgaggctctgcacaaccactacacgcagaagagcctctccctgtctccgggtggtggcggatcgggaggtggcggatcccaggtgcagttacagcagtcgggcgcaggactgttgaagccttcggagaccctgtccctcacctgcgctgtccatggtgggtccttcagtggttactactggaactggattcgccagccaccagggaaggggctagagtggattggggaaatcaatcatgctggaaacaccaactacaacccgtccctcaagagtcgagtcaccatatcattagacacgtccaagaaccagttctccctgacgctgacctctgtgaccgccgcggacacggctgtgtattactgtgcgagaggatattgtagaagtaccacctgctactttgactactggggcaagggaaccctagtcaccgtctcctcagcctccaccaagggcccatcggtcttccccctggcaccctcctccaagagcacctctgggggcacagcggccctgggctgcctggtcaaggactacttccccgaaccggtgacggtgtcgtggaactcaggcgccctgaccagcggcgtgcacaccttcccggctgtcctacagtcctcaggactctactccctcgagagcgtggtgaccgtgccctccagcagcttgggcacccagacctacatctgcaacgtgaatcacaagcccagcaacaccaaggtggacaagaaagttgagcccaaatcttgt

SEQ ID NO: 580 - protein, 214 aa, synthetic construct
  REGION 1..214: note = source = /note="Description of Artificial Sequence: Synthetic polypeptide"
DIQMTQSPSSLSASVGDRVTITCRASQGIRNYLAWYQQKPGKAPKLLIYAASTLQSGVPSRFSGSGSGTDFTLTISSLQPEDVATYYCQRYNRAPYTFGEGTKVEIKRTVAAPSVFIFPPSDEQLKSGTASVVCLLNNFYPREAKVQWKVDNALQSGNSQESVTEQDSKDSTYSLESTLTLSKADYEKHKVYACEVTHQGLSSPVTKSFNRGEC

SEQ ID NO: 581 - protein, 214 aa, synthetic construct
  REGION 1..214: note = source = /note="Description of Artificial Sequence: Synthetic polypeptide"
EIVLTQSPGTLSLSPGERATLSCRASQSVRSSYLAWYQQKPGQEPRLLIYGASSRATGIPDRFSGSGSGTDFTLTISRLEPEDFAVYYCQQYGSSPTFGQGTRLEIKRTVAAPSVFIFPPSDEQLKSGTASVVCLLNNFYPREAKVQWKVDNALQSGNSQESVTEQDSKDSTYSLKSTLTLSKADYEKHKVYACEVTHQGLSSPVTKSFNRGEC

SEQ ID NO: 582 - protein, 682 aa, synthetic construct
  REGION 1..682: note = source = /note="Description of Artificial Sequence: Synthetic polypeptide"
EVQLVESGGGLVQPGRSLRLSCAASGFTFDDYAMHWVRQAPGKKLEWVSAITWNSGHIDYADSVEGRFTISRDNAKNSLYLQMNSLRAEDTAVYYCAKVSYLSTASSLDYWGQGTLVTVSSASTKGPSVFPLAPSSKSTSGGTAALGCLVKDYFPEPVTVSWNSGALTSGVHTFPAVLQSSGLYSLKSVVTVPSSSLGTQTYICNVNHKPSNTKVDKKVEPKSCDKTHTCPPCPAPELLGGPSVFLFPPKPKDTLMISRTPEVTCVVVDVSHEDPEVKFNWYVDGVEVHNAKTKPCEEQYGSTYRCVSVLTVLHQDWLNGKEYKCKVSNKALPAPIEKTISKAKGQPREPQVYTLPPSREEMTKNQVSLTCLVKGFYPSDIAVEWESNGQPENNYKTTPPVLDSDGSFFLYSKLTVDKSRWQQGNVFSCSVMHEALHNHYTQKSLSLSPGGGGSGGGGSQVQLQQSGAGLLKPSETLSLTCAVHGGSFSGYYWNWIRQPPGKGLEWIGEINHAGNTNYNPSLKSRVTISLDTSKNQFSLTLTSVTAADTAVYYCARGYCRSTTCYFDYWGKGTLVTVSSASTKGPSVFPLAPSSKSTSGGTAALGCLVKDYFPEPVTVSWNSGALTSGVHTFPAVLQSSGLYSLESVVTVPSSSLGTQTYICNVNHKPSNTKVDKKVEPKSC

SEQ ID NO: 583 - DNA, 642 bp, synthetic construct; identical to SEQ ID NO: 577
  misc_feature 1..642: note = source = /note="Description of Artificial Sequence: Synthetic polynucleotide"
  source 1..642: mol_type = other DNA

SEQ ID NO: 584 - DNA, 642 bp, synthetic construct
  misc_feature 1..642: note = source = /note="Description of Artificial Sequence: Synthetic polynucleotide"
  source 1..642: mol_type = other DNA
gacatccagatgacccagtctccatcctccctgtctgcatctgtaggagacagagtcaccatcacttgccgggcaagtcagagcattaacaactatttaaattggtatcagcagagaccagggaaagagcctaagctcctgatctatgctgcatccagtttgcaaagtggggtcccatcaaggttcagtggcagtggatctgggacagatttcactctcaccatcagcagtctgcaacctgaagattttgcaacttactactgtcaacagagttacagtacccctcggacgttcggccaagggaccaagctggaaatcaaacgaacggtggctgcaccatctgtcttcatcttcccgccatctgatgagcagttgaaatctggtaccgcctctgttgtgtgcctgctgaataacttctatcccagagaggccaaagtacagtggaaggtggataacgccctccaatcgggtaactcccaggagagtgtcacagagcaggacagcaaggacagcacctacagcctcaagagcaccctgacgctgagcaaagcagactacgagaaacacaaagtctacgcctgcgaagtcacccatcagggcctgagctcgcccgtcacaaagagcttcaacaggggagagtgt

SEQ ID NO: 585 - DNA, 2040 bp, synthetic construct
  misc_feature 1..2040: note = source = /note="Description of Artificial Sequence: Synthetic polynucleotide"
  source 1..2040: mol_type = other DNA
gaggtacaactggtggaatcaggtggaggtttggtgcagccggggagatcgctcaggcttagctgtgcggcatcggggtttactttcgatgattatgcgatgcattgggtccggcaagcgcctggaaaaaagctcgagtgggtttccgccattacgtggaatagcggacacatcgattatgcagacagtgtggagggcagattcacaatctcacgagacaatgctaagaacagcctgtaccttcagatgaactcacttcgcgcggaagataccgccgtatactactgcgccaaagtctcctacttgtctacagcttcgtcgctcgactattggggtcaaggaacgttggtcaccgtctctagtgcctccaccaagggcccatcggtcttccccctggcaccctcctccaagagcacctctgggggcacagcggccctgggctgcctggtcaaggactacttccccgaaccggtgacggtgtcgtggaactcaggcgccctgaccagcggcgtgcacaccttcccggctgtcctacagtcctcaggactctactccctcaaaagcgtggtgaccgtgccctccagcagcttgggcacccagacctacatctgcaacgtgaatcacaagcccagcaacaccaaggtggacaagaaagttgagcccaaatcttgtgacaaaactcacacatgcccaccgtgcccagcacctgaactcctggggggaccgtcagtcttcctcttccccccaaaacccaaggacaccctcatgatctcccggacccctgaggtcacatgcgtggtggtggacgtgagccacgaagaccctgaggtcaagttcaactggtacgtggacggcgtggaggtgcataatgccaagacaaagccgtgtgaggagcagtacggcagcacgtaccgttgtgtcagcgtcctcaccgtcctgcaccaggactggctgaatggcaaggagtacaagtgcaaggtctccaacaaagccctcccagcccccatcgagaaaaccatctccaaagccaaagggcagccccgagaaccacaggtgtacaccctgcccccatcccgggaggagatgaccaagaaccaggtcagcctgacctgcctggtcaaaggcttctatcccagcgacatcgccgtggagtgggagagcaatgggcagccggagaacaactacaagaccacgcctcccgtgctggactccgacggctccttcttcctctatagcaagctcaccgtggacaagagcaggtggcagcaggggaacgtcttctcatgctccgtgatgcatgaggctctgcacaaccactacacgcagaagagcctctccctgtctccgggtggtggcggatcgggaggtggcggatcccaggtgcagctgcaggagtcgggcccaggactggtgaagccttcggagaccctgtccctcacctgcactgtctctggtggctccatcagtagttacttctggagctggattcggcagcccccaggtaagggactggagtggattggctatatctattacagtgggcagaccaaatacaacccctccctcaagagtcgagtcaccatatcaatagacacgtccaagaaccagttctccctgaagctgagctctgtgaccgctgcggacacggccgtgtattactgtgcgagagaaactgggagctactacggctttgactactggggcaagggaaccctggtcaccgtctcctcagcctccaccaagggcccatcggtcttccccctggcaccctcctccaagagcacctctgggggcacagcggccctgggctgcctggtcaaggactacttccccgaaccggtgacggtgtcgtggaactcaggcgccctgaccagcggcgtgcacaccttcccggctgtcctacagtcctcaggactctactccctcgagagcgtggtgaccgtgccctccagcagcttgggcacccagacctacatctgcaacgtgaatcacaagcccagcaacaccaaggtggacaagaaagttgagcccaaatcttgt

SEQ ID NO: 586 - protein, 214 aa, synthetic construct; identical to SEQ ID NO: 580
  REGION 1..214: note = source = /note="Description of Artificial Sequence: Synthetic polypeptide"

SEQ ID NO: 587 - protein, 214 aa, synthetic construct
  REGION 1..214: note = source = /note="Description of Artificial Sequence: Synthetic polypeptide"
DIQMTQSPSSLSASVGDRVTITCRASQSINNYLNWYQQRPGKEPKLLIYAASSLQSGVPSRFSGSGSGTDFTLTISSLQPEDFATYYCQQSYSTPRTFGQGTKLEIKRTVAAPSVFIFPPSDEQLKSGTASVVCLLNNFYPREAKVQWKVDNALQSGNSQESVTEQDSKDSTYSLKSTLTLSKADYEKHKVYACEVTHQGLSSPVTKSFNRGEC

SEQ ID NO: 588 - protein, 680 aa, synthetic construct
  REGION 1..680: note = source = /note="Description of Artificial Sequence: Synthetic polypeptide"
EVQLVESGGGLVQPGRSLRLSCAASGFTFDDYAMHWVRQAPGKKLEWVSAITWNSGHIDYADSVEGRFTISRDNAKNSLYLQMNSLRAEDTAVYYCAKVSYLSTASSLDYWGQGTLVTVSSASTKGPSVFPLAPSSKSTSGGTAALGCLVKDYFPEPVTVSWNSGALTSGVHTFPAVLQSSGLYSLKSVVTVPSSSLGTQTYICNVNHKPSNTKVDKKVEPKSCDKTHTCPPCPAPELLGGPSVFLFPPKPKDTLMISRTPEVTCVVVDVSHEDPEVKFNWYVDGVEVHNAKTKPCEEQYGSTYRCVSVLTVLHQDWLNGKEYKCKVSNKALPAPIEKTISKAKGQPREPQVYTLPPSREEMTKNQVSLTCLVKGFYPSDIAVEWESNGQPENNYKTTPPVLDSDGSFFLYSKLTVDKSRWQQGNVFSCSVMHEALHNHYTQKSLSLSPGGGGSGGGGSQVQLQESGPGLVKPSETLSLTCTVSGGSISSYFWSWIRQPPGKGLEWIGYIYYSGQTKYNPSLKSRVTISIDTSKNQFSLKLSSVTAADTAVYYCARETGSYYGFDYWGKGTLVTVSSASTKGPSVFPLAPSSKSTSGGTAALGCLVKDYFPEPVTVSWNSGALTSGVHTFPAVLQSSGLYSLESVVTVPSSSLGTQTYICNVNHKPSNTKVDKKVEPKSC

SEQ ID NO: 589 - DNA, 642 bp, synthetic construct; identical to SEQ ID NO: 577
  misc_feature 1..642: note = source = /note="Description of Artificial Sequence: Synthetic polynucleotide"
  source 1..642: mol_type = other DNA

SEQ ID NO: 590 - DNA, 660 bp, synthetic construct
  misc_feature 1..660: note = source = /note="Description of Artificial Sequence: Synthetic polynucleotide"
  source 1..660: mol_type = other DNA
gacatccagatgacccagtctccaagctccctgtctgcgtctgtgggcgatagggtcaccatcacttgcaggtccagccagagtgtgttatacagctccaacaataagaactacttagtttggtaccagcagaaaccaggaaaggagcctaaactgctcatttactgggcatctacccgggaatccggggtccctagtcgattcagtggcagcgggtctgggacagatttcactctcaccatcagcagcctgcagcctgaagatgtggcaacttattactgtcagcaatattataagactcctctcactttcggcggagggaccaaggtggagatcaaacgaacggtggctgcaccatctgtcttcatcttcccgccatctgatgagcagttgaaatctggtaccgcctctgttgtgtgcctgctgaataacttctatcccagagaggccaaagtacagtggaaggtggataacgccctccaatcgggtaactcccaggagagtgtcacagagcaggacagcaaggacagcacctacagcctcaagagcaccctgacgctgagcaaagcagactacgagaaacacaaagtctacgcctgcgaagtcacccatcagggcctgagctcgcccgtcacaaagagcttcaacaggggagagtgt

SEQ ID NO: 591 - DNA, 2061 bp, synthetic construct
  misc_feature 1..2061: note = source = /note="Description of Artificial Sequence: Synthetic polynucleotide"
  source 1..2061: mol_type = other DNA
gaggtacaactggtggaatcaggtggaggtttggtgcagccggggagatcgctcaggcttagctgtgcggcatcggggtttactttcgatgattatgcgatgcattgggtccggcaagcgcctggaaaaaagctcgagtgggtttccgccattacgtggaatagcggacacatcgattatgcagacagtgtggagggcagattcacaatctcacgagacaatgctaagaacagcctgtaccttcagatgaactcacttcgcgcggaagataccgccgtatactactgcgccaaagtctcctacttgtctacagcttcgtcgctcgactattggggtcaaggaacgttggtcaccgtctctagtgcctccaccaagggcccatcggtcttccccctggcaccctcctccaagagcacctctgggggcacagcggccctgggctgcctggtcaaggactacttccccgaaccggtgacggtgtcgtggaactcaggcgccctgaccagcggcgtgcacaccttcccggctgtcctacagtcctcaggactctactccctcaaaagcgtggtgaccgtgccctccagcagcttgggcacccagacctacatctgcaacgtgaatcacaagcccagcaacaccaaggtggacaagaaagttgagcccaaatcttgtgacaaaactcacacatgcccaccgtgcccagcacctgaactcctggggggaccgtcagtcttcctcttccccccaaaacccaaggacaccctcatgatctcccggacccctgaggtcacatgcgtggtggtggacgtgagccacgaagaccctgaggtcaagttcaactggtacgtggacggcgtggaggtgcataatgccaagacaaagccgtgtgaggagcagtacggcagcacgtaccgttgtgtcagcgtcctcaccgtcctgcaccaggactggctgaatggcaaggagtacaagtgcaaggtctccaacaaagccctcccagcccccatcgagaaaaccatctccaaagccaaagggcagccccgagaaccacaggtgtacaccctgcccccatcccgggaggagatgaccaagaaccaggtcagcctgacctgcctggtcaaaggcttctatcccagcgacatcgccgtggagtgggagagcaatgggcagccggagaacaactacaagaccacgcctcccgtgctggactccgacggctccttcttcctctatagcaagctcaccgtggacaagagcaggtggcagcaggggaacgtcttctcatgctccgtgatgcatgaggctctgcacaaccactacacgcagaagagcctctccctgtctccgggtggtggcggatcgggaggtggcggatcccaggtacagttgcaggagtcaggtccaggactggtgaagccctcggagaccctctcactcacctgtaccatctccggggacagtgtctctaccaacagtgttgcttggaactggattaggcagcccccagggaaaggccttgagtggataggaaggacatactacaggtccaagtggtataatgattatgcagtttctctgaaaagtcgagtaaccatcagcccagacacatccaagaaccagttctccctgaagctgagctctgtgactgccgcggacacggctgtgtattactgtgcaagagaggatggggatagctactaccgctacggtatggacgtctggggcaaagggaccacggtcaccgtctcctcagcctccaccaagggcccatcggtcttccccctggcaccctcctccaagagcacctctgggggcacagcggccctgggctgcctggtcaaggactacttccccgaaccggtgacggtgtcgtggaactcaggcgccctgaccagcggcgtgcacaccttcccggctgtcctacagtcctcaggactctactccctcgagagcgtggtgaccgtgccctccagcagcttgggcacccagacctacatctgcaacgtgaatcacaagcccagcaacaccaaggtggacaagaaagttgagcccaaatcttgt

SEQ ID NO: 592 - protein, 214 aa, synthetic construct; identical to SEQ ID NO: 580
  REGION 1..214: note = source = /note="Description of Artificial Sequence: Synthetic polypeptide"

SEQ ID NO: 593 - protein, 220 aa, synthetic construct
  REGION 1..220: note = source = /note="Description of Artificial Sequence: Synthetic polypeptide"
DIQMTQSPSSLSASVGDRVTITCRSSQSVLYSSNNKNYLVWYQQKPGKEPKLLIYWASTRESGVPSRFSGSGSGTDFTLTISSLQPEDVATYYCQQYYKTPLTFGGGTKVEIKRTVAAPSVFIFPPSDEQLKSGTASVVCLLNNFYPREAKVQWKVDNALQSGNSQESVTEQDSKDSTYSLKSTLTLSKADYEKHKVYACEVTHQGLSSPVTKSFNRGEC

SEQ ID NO: 594 - protein, 687 aa, synthetic construct
  REGION 1..687: note = source = /note="Description of Artificial Sequence: Synthetic polypeptide"
EVQLVESGGGLVQPGRSLRLSCAASGFTFDDYAMHWVRQAPGKKLEWVSAITWNSGHIDYADSVEGRFTISRDNAKNSLYLQMNSLRAEDTAVYYCAKVSYLSTASSLDYWGQGTLVTVSSASTKGPSVFPLAPSSKSTSGGTAALGCLVKDYFPEPVTVSWNSGALTSGVHTFPAVLQSSGLYSLKSVVTVPSSSLGTQTYICNVNHKPSNTKVDKKVEPKSCDKTHTCPPCPAPELLGGPSVFLFPPKPKDTLMISRTPEVTCVVVDVSHEDPEVKFNWYVDGVEVHNAKTKPCEEQYGSTYRCVSVLTVLHQDWLNGKEYKCKVSNKALPAPIEKTISKAKGQPREPQVYTLPPSREEMTKNQVSLTCLVKGFYPSDIAVEWESNGQPENNYKTTPPVLDSDGSFFLYSKLTVDKSRWQQGNVFSCSVMHEALHNHYTQKSLSLSPGGGGSGGGGSQVQLQESGPGLVKPSETLSLTCTISGDSVSTNSVAWNWIRQPPGKGLEWIGRTYYRSKWYNDYAVSLKSRVTISPDTSKNQFSLKLSSVTAADTAVYYCAREDGDSYYRYGMDVWGKGTTVTVSSASTKGPSVFPLAPSSKSTSGGTAALGCLVKDYFPEPVTVSWNSGALTSGVHTFPAVLQSSGLYSLESVVTVPSSSLGTQTYICNVNHKPSNTKVDKKVEPKSC

SEQ ID NO: 595 - DNA, 651 bp, synthetic construct
  misc_feature 1..651: note = source = /note="Description of Artificial Sequence: Synthetic polynucleotide"
  source 1..651: mol_type = other DNA
cagtctgtgctgacgcagccgccctcagtgtctggggccccagggcagagggtcaccatctcctgcactgggagcagttccaacatcggggcaggttatgatgtacactggtaccagcagtttccaggaacagcccccaaactcctcatccaaggtaacagcaatcggccctcaggggtccctgaccgattctctggctccaagtctggcacctcagcctccctggccatcactgggctccaggctgaggatgaggctgattattactgccagtcctatgacagcagcctgagtggttcggtgttcggcgaagggaccaagctgaccgtcctaggtcagcccaaggctgccccctcggtcactctgttcccgccctcctctgaggagcttcaagccaacaaggccacactggtgtgtctcataagtgacttctacccgggagccgtgacagtggcctggaaggcagatagcagccccgtcaaggcgggagtggagaccaccacaccctccaaacaaagcaacaacaagtacgcggccgaaagctatctgagcctgacgcctgagcagtggaagtcccacagaagctacagctgccaggtcacgcatgaagggagcaccgtggagaagacagtggcccctacagaatgttca

SEQ ID NO: 596 - DNA, 642 bp, synthetic construct; identical to SEQ ID NO: 578
  misc_feature 1..642: note = source = /note="Description of Artificial Sequence: Synthetic polynucleotide"
  source 1..642: mol_type = other DNA

SEQ ID NO: 597 - DNA, 2031 bp, synthetic construct
  misc_feature 1..2031: note = source = /note="Description of Artificial Sequence: Synthetic polynucleotide"
  source 1..2031: mol_type = other DNA
gaggtgcagctggtgcagtctggagcagaggtgaaaaagcccggggagtctctgaagatctcctgtaagacttctgaatacagctttaccagctactggatcggctgggtgcgccagatgcccgggaaaaaactggagtggatggggatcatctatcttggtgactcagataccagatacagcccgtccttccaaggccaggtcaccatctcagccgacaagtccatcagtaccgcctacctgcagtggagcagcctgaaggcctcggacaccgccatgtattactgtgcgagaagtaactggggtcttgactactggggccagggaaccctggtcaccgtctctagtgcctccaccaagggcccatcggtcttccccctggcaccctcctccaagagcacctctgggggcacagcggccctgggctgcctggtcaaggactacttccccgaaccggtgacggtgtcgtggaactcaggcgccctgaccagcggcgtgcacaccttcccggctgtcctacagtcctcaggactctactccctcaaaagcgtggtgaccgtgccctccagcagcttgggcacccagacctacatctgcaacgtgaatcacaagcccagcaacaccaaggtggacaagaaagttgagcccaaatcttgtgacaaaactcacacatgcccaccgtgcccagcacctgaactcctggggggaccgtcagtcttcctcttccccccaaaacccaaggacaccctcatgatctcccggacccctgaggtcacatgcgtggtggtggacgtgagccacgaagaccctgaggtcaagttcaactggtacgtggacggcgtggaggtgcataatgccaagacaaagccgtgtgaggagcagtacggcagcacgtaccgttgtgtcagcgtcctcaccgtcctgcaccaggactggctgaatggcaaggagtacaagtgcaaggtctccaacaaagccctcccagcccccatcgagaaaaccatctccaaagccaaagggcagccccgagaaccacaggtgtacaccctgcccccatcccgggaggagatgaccaagaaccaggtcagcctgacctgcctggtcaaaggcttctatcccagcgacatcgccgtggagtgggagagcaatgggcagccggagaacaactacaagaccacgcctcccgtgctggactccgacggctccttcttcctctatagcaagctcaccgtggacaagagcaggtggcagcaggggaacgtcttctcatgctccgtgatgcatgaggctctgcacaaccactacacgcagaagagcctctccctgtctccgggtggtggcggatcgggaggtggcggatcccaggtgcagttacagcagtcgggcgcaggactgttgaagccttcggagaccctgtccctcacctgcgctgtccatggtgggtccttcagtggttactactggaactggattcgccagccaccagggaaggggctagagtggattggggaaatcaatcatgctggaaacaccaactacaacccgtccctcaagagtcgagtcaccatatcattagacacgtccaagaaccagttctccctgacgctgacctctgtgaccgccgcggacacggctgtgtattactgtgcgagaggatattgtagaagtaccacctgctactttgactactggggcaagggaaccctagtcaccgtctcctcagcctccaccaagggcccatcggtcttccccctggcaccctcctccaagagcacctctgggggcacagcggccctgggctgcctggtcaaggactacttccccgaaccggtgacggtgtcgtggaactcaggcgccctgaccagcggcgtgcacaccttcccggctgtcctacagtcctcaggactctactccctcgagagcgtggtgaccgtgccctccagcagcttgggcacccagacctacatctgcaacgtgaatcacaagcccagcaacaccaaggtggacaagaaagttgagcccaaatcttgt

SEQ ID NO: 598 - protein, 217 aa, synthetic construct
  REGION 1..217: note = source = /note="Description of Artificial Sequence: Synthetic polypeptide"
QSVLTQPPSVSGAPGQRVTISCTGSSSNIGAGYDVHWYQQFPGTAPKLLIQGNSNRPSGVPDRFSGSKSGTSASLAITGLQAEDEADYYCQSYDSSLSGSVFGEGTKLTVLGQPKAAPSVTLFPPSSEELQANKATLVCLISDFYPGAVTVAWKADSSPVKAGVETTTPSKQSNNKYAAESYLSLTPEQWKSHRSYSCQVTHEGSTVEKTVAPTECS

SEQ ID NO: 599 - protein, 214 aa, synthetic construct; identical to SEQ ID NO: 581
  REGION 1..214: note = source = /note="Description of Artificial Sequence: Synthetic polypeptide"

SEQ ID NO: 600 - protein, 677 aa, synthetic construct
  REGION 1..677: note = source = /note="Description of Artificial Sequence: Synthetic polypeptide"
EVQLVQSGAEVKKPGESLKISCKTSEYSFTSYWIGWVRQMPGKKLEWMGIIYLGDSDTRYSPSFQGQVTISADKSISTAYLQWSSLKASDTAMYYCARSNWGLDYWGQGTLVTVSSASTKGPSVFPLAPSSKSTSGGTAALGCLVKDYFPEPVTVSWNSGALTSGVHTFPAVLQSSGLYSLKSVVTVPSSSLGTQTYICNVNHKPSNTKVDKKVEPKSCDKTHTCPPCPAPELLGGPSVFLFPPKPKDTLMISRTPEVTCVVVDVSHEDPEVKFNWYVDGVEVHNAKTKPCEEQYGSTYRCVSVLTVLHQDWLNGKEYKCKVSNKALPAPIEKTISKAKGQPREPQVYTLPPSREEMTKNQVSLTCLVKGFYPSDIAVEWESNGQPENNYKTTPPVLDSDGSFFLYSKLTVDKSRWQQGNVFSCSVMHEALHNHYTQKSLSLSPGGGGSGGGGSQVQLQQSGAGLLKPSETLSLTCAVHGGSFSGYYWNWIRQPPGKGLEWIGEINHAGNTNYNPSLKSRVTISLDTSKNQFSLTLTSVTAADTAVYYCARGYCRSTTCYFDYWGKGTLVTVSSASTKGPSVFPLAPSSKSTSGGTAALGCLVKDYFPEPVTVSWNSGALTSGVHTFPAVLQSSGLYSLESVVTVPSSSLGTQTYICNVNHKPSNTKVDKKVEPKSC

SEQ ID NO: 601 - DNA, 651 bp, synthetic construct; identical to SEQ ID NO: 595
  misc_feature 1..651: note = source = /note="Description of Artificial Sequence: Synthetic polynucleotide"
  source 1..651: mol_type = other DNA

SEQ ID NO: 602 - DNA, 642 bp, synthetic construct; identical to SEQ ID NO: 584
  misc_feature 1..642: note = source = /note="Description of Artificial Sequence: Synthetic polynucleotide"
  source 1..642: mol_type = other DNA

SEQ ID NO: 603 - DNA, 2025 bp, synthetic construct
  misc_feature 1..2025: note = source = /note="Description of Artificial Sequence: Synthetic polynucleotide"
  source 1..2025: mol_type = other DNA
gaggtgcagctggtgcagtctggagcagaggtgaaaaagcccggggagtctctgaagatctcctgtaagacttctgaatacagctttaccagctactggatcggctgggtgcgccagatgcccgggaaaaaactggagtggatggggatcatctatcttggtgactcagataccagatacagcccgtccttccaaggccaggtcaccatctcagccgacaagtccatcagtaccgcctacctgcagtggagcagcctgaaggcctcggacaccgccatgtattactgtgcgagaagtaactggggtcttgactactggggccagggaaccctggtcaccgtctctagtgcctccaccaagggcccatcggtcttccccctggcaccctcctccaagagcacctctgggggcacagcggccctgggctgcctggtcaaggactacttccccgaaccggtgacggtgtcgtggaactcaggcgccctgaccagcggcgtgcacaccttcccggctgtcctacagtcctcaggactctactccctcaaaagcgtggtgaccgtgccctccagcagcttgggcacccagacctacatctgcaacgtgaatcacaagcccagcaacaccaaggtggacaagaaagttgagcccaaatcttgtgacaaaactcacacatgcccaccgtgcccagcacctgaactcctggggggaccgtcagtcttcctcttccccccaaaacccaaggacaccctcatgatctcccggacccctgaggtcacatgcgtggtggtggacgtgagccacgaagaccctgaggtcaagttcaactggtacgtggacggcgtggaggtgcataatgccaagacaaagccgtgtgaggagcagtacggcagcacgtaccgttgtgtcagcgtcctcaccgtcctgcaccaggactggctgaatggcaaggagtacaagtgcaaggtctccaacaaagccctcccagcccccatcgagaaaaccatctccaaagccaaagggcagccccgagaaccacaggtgtacaccctgcccccatcccgggaggagatgaccaagaaccaggtcagcctgacctgcctggtcaaaggcttctatcccagcgacatcgccgtggagtgggagagcaatgggcagccggagaacaactacaagaccacgcctcccgtgctggactccgacggctccttcttcctctatagcaagctcaccgtggacaagagcaggtggcagcaggggaacgtcttctcatgctccgtgatgcatgaggctctgcacaaccactacacgcagaagagcctctccctgtctccgggtggtggcggatcgggaggtggcggatcccaggtgcagctgcaggagtcgggcccaggactggtgaagccttcggagaccctgtccctcacctgcactgtctctggtggctccatcagtagttacttctggagctggattcggcagcccccaggtaagggactggagtggattggctatatctattacagtgggcagaccaaatacaacccctccctcaagagtcgagtcaccatatcaatagacacgtccaagaaccagttctccctgaagctgagctctgtgaccgctgcggacacggccgtgtattactgtgcgagagaaactgggagctactacggctttgactactggggcaagggaaccctggtcaccgtctcctcagcctccaccaagggcccatcggtcttccccctggcaccctcctccaagagcacctctgggggcacagcggccctgggctgcctggtcaaggactacttccccgaaccggtgacggtgtcgtggaactcaggcgccctgaccagcggcgtgcacaccttcccggctgtcctacagtcctcaggactctactccctcgagagcgtggtgaccgtgccctccagcagcttgggcacccagacctacatctgcaacgtgaatcacaagcccagcaacaccaaggtggacaagaaagttgagcccaaatcttgt

SEQ ID NO: 604 - protein, 217 aa, synthetic construct; identical to SEQ ID NO: 598
  REGION 1..217: note = source = /note="Description of Artificial Sequence: Synthetic polypeptide"

SEQ ID NO: 605 - protein, 214 aa, synthetic construct; identical to SEQ ID NO: 587
  REGION 1..214: note = source = /note="Description of Artificial Sequence: Synthetic polypeptide"

SEQ ID NO: 606 - protein, 675 aa, synthetic construct
  REGION 1..675: note = source = /note="Description of Artificial Sequence: Synthetic polypeptide"
EVQLVQSGAEVKKPGESLKISCKTSEYSFTSYWIGWVRQMPGKKLEWMGIIYLGDSDTRYSPSFQGQVTISADKSISTAYLQWSSLKASDTAMYYCARSNWGLDYWGQGTLVTVSSASTKGPSVFPLAPSSKSTSGGTAALGCLVKDYFPEPVTVSWNSGALTSGVHTFPAVLQSSGLYSLKSVVTVPSSSLGTQTYICNVNHKPSNTKVDKKVEPKSCDKTHTCPPCPAPELLGGPSVFLFPPKPKDTLMISRTPEVTCVVVDVSHEDPEVKFNWYVDGVEVHNAKTKPCEEQYGSTYRCVSVLTVLHQDWLNGKEYKCKVSNKALPAPIEKTISKAKGQPREPQVYTLPPSREEMTKNQVSLTCLVKGFYPSDIAVEWESNGQPENNYKTTPPVLDSDGSFFLYSKLTVDKSRWQQGNVFSCSVMHEALHNHYTQKSLSLSPGGGGSGGGGSQVQLQESGPGLVKPSETLSLTCTVSGGSISSYFWSWIRQPPGKGLEWIGYIYYSGQTKYNPSLKSRVTISIDTSKNQFSLKLSSVTAADTAVYYCARETGSYYGFDYWGKGTLVTVSSASTKGPSVFPLAPSSKSTSGGTAALGCLVKDYFPEPVTVSWNSGALTSGVHTFPAVLQSSGLYSLESVVTVPSSSLGTQTYICNVNHKPSNTKVDKKVEPKSC

SEQ ID NO: 607 - DNA, 651 bp, synthetic construct; identical to SEQ ID NO: 595
  misc_feature 1..651: note = source = /note="Description of Artificial Sequence: Synthetic polynucleotide"
  source 1..651: mol_type = other DNA

SEQ ID NO: 608 - DNA, 660 bp, synthetic construct; identical to SEQ ID NO: 590
  misc_feature 1..660: note = source = /note="Description of Artificial Sequence: Synthetic polynucleotide"
  source 1..660: mol_type = other DNA

SEQ ID NO: 609 - DNA, 2046 bp, synthetic construct
  misc_feature 1..2046: note = source = /note="Description of Artificial Sequence: Synthetic polynucleotide"
  source 1..2046: mol_type = other DNA
gaggtgcagctggtgcagtctggagcagaggtgaaaaagcccggggagtctctgaagatctcctgtaagacttctgaatacagctttaccagctactggatcggctgggtgcgccagatgcccgggaaaaaactggagtggatggggatcatctatcttggtgactcagataccagatacagcccgtccttccaaggccaggtcaccatctcagccgacaagtccatcagtaccgcctacctgcagtggagcagcctgaaggcctcggacaccgccatgtattactgtgcgagaagtaactggggtcttgactactggggccagggaaccctggtcaccgtctctagtgcctccaccaagggcccatcggtcttccccctggcaccctcctccaagagcacctctgggggcacagcggccctgggctgcctggtcaaggactacttccccgaaccggtgacggtgtcgtggaactcaggcgccctgaccagcggcgtgcacaccttcccggctgtcctacagtcctcaggactctactccctcaaaagcgtggtgaccgtgccctccagcagcttgggcacccagacctacatctgcaacgtgaatcacaagcccagcaacaccaaggtggacaagaaagttgagcccaaatcttgtgacaaaactcacacatgcccaccgtgcccagcacctgaactcctggggggaccgtcagtcttcctcttccccccaaaacccaaggacaccctcatgatctcccggacccctgaggtcacatgcgtggtggtggacgtgagccacgaagaccctgaggtcaagttcaactggtacgtggacggcgtggaggtgcataatgccaagacaaagccgtgtgaggagcagtacggcagcacgtaccgttgtgtcagcgtcctcaccgtcctgcaccaggactggctgaatggcaaggagtacaagtgcaaggtctccaacaaagccctcccagcccccatcgagaaaaccatctccaaagccaaagggcagccccgagaaccacaggtgtacaccctgcccccatcccgggaggagatgaccaagaaccaggtcagcctgacctgcctggtcaaaggcttctatcccagcgacatcgccgtggagtgggagagcaatgggcagccggagaacaactacaagaccacgcctcccgtgctggactccgacggctccttcttcctctatagcaagctcaccgtggacaagagcaggtggcagcaggggaacgtcttctcatgctccgtgatgcatgaggctctgcacaaccactacacgcagaagagcctctccctgtctccgggtggtggcggatcgggaggtggcggatcccaggtacagttgcaggagtcaggtccaggactggtgaagccctcggagaccctctcactcacctgtaccatctccggggacagtgtctctaccaacagtgttgcttggaactggattaggcagcccccagggaaaggccttgagtggataggaaggacatactacaggtccaagtggtataatgattatgcagtttctctgaaaagtcgagtaaccatcagcccagacacatccaagaaccagttctccctgaagctgagctctgtgactgccgcggacacggctgtgtattactgtgcaagagaggatggggatagctactaccgctacggtatggacgtctggggcaaagggaccacggtcaccgtctcctcagcctccaccaagggcccatcggtcttccccctggcaccctcctccaagagcacctctgggggcacagcggccctgggctgcctggtcaaggactacttccccgaaccggtgacggtgtcgtggaactcaggcgccctgaccagcggcgtgcacaccttcccggctgtcctacagtcctcaggactctactccctcgagagcgtggtgaccgtgccctccagcagcttgggcacccagacctacatctgcaacgtgaatcacaagcccagcaacaccaaggtggacaagaaagttgagcccaaatcttgt

SEQ ID NO: 610 - protein, 217 aa, synthetic construct; identical to SEQ ID NO: 598
  REGION 1..217: note = source = /note="Description of Artificial Sequence: Synthetic polypeptide"

SEQ ID NO: 611 - protein, 220 aa, synthetic construct; identical to SEQ ID NO: 593
  REGION 1..220: note = source = /note="Description of Artificial Sequence: Synthetic polypeptide"

SEQ ID NO: 612 - protein, 682 aa, synthetic construct
  REGION 1..682: note = source = /note="Description of Artificial Sequence: Synthetic polypeptide"
EVQLVQSGAEVKKPGESLKISCKTSEYSFTSYWIGWVRQMPGKKLEWMGIIYLGDSDTRYSPSFQGQVTISADKSISTAYLQWSSLKASDTAMYYCARSNWGLDYWGQGTLVTVSSASTKGPSVFPLAPSSKSTSGGTAALGCLVKDYFPEPVTVSWNSGALTSGVHTFPAVLQSSGLYSLKSVVTVPSSSLGTQTYICNVNHKPSNTKVDKKVEPKSCDKTHTCPPCPAPELLGGPSVFLFPPKPKDTLMISRTPEVTCVVVDVSHEDPEVKFNWYVDGVEVHNAKTKPCEEQYGSTYRCVSVLTVLHQDWLNGKEYKCKVSNKALPAPIEKTISKAKGQPREPQVYTLPPSREEMTKNQVSLTCLVKGFYPSDIAVEWESNGQPENNYKTTPPVLDSDGSFFLYSKLTVDKSRWQQGNVFSCSVMHEALHNHYTQKSLSLSPGGGGSGGGGSQVQLQESGPGLVKPSETLSLTCTISGDSVSTNSVAWNWIRQPPGKGLEWIGRTYYRSKWYNDYAVSLKSRVTISPDTSKNQFSLKLSSVTAADTAVYYCAREDGDSYYRYGMDVWGKGTTVTVSSASTKGPSVFPLAPSSKSTSGGTAALGCLVKDYFPEPVTVSWNSGALTSGVHTFPAVLQSSGLYSLESVVTVPSSSLGTQTYICNVNHKPSNTKVDKKVEPKSC

SEQ ID NO: 613 - DNA, 642 bp, synthetic construct
  misc_feature 1..642: note = source = /note="Description of Artificial Sequence: Synthetic polynucleotide"
  source 1..642: mol_type = other DNA
gaaattgtgttgacgcagtctccaggcaccctgtctttgtctccaggggaaagagccaccctctcctgcagggccagtcagagtgttagaagcagttacttagcctggtaccagcagaaacctggccaggctcccaggctcctcatctatggtgcatccagcagggccactggcatcccagacaggttcagtggcagtgggtctgggacagacttcactctcaccatcagcagactggagcctgaagattttgcagtgtattactgtcagcagtatggtagctcacctaccttcggcgaggggacacgactggagattaaacgaacggtggctgcaccatctgtcttcatcttcccgccatctgatgagcagttgaaatctggtaccgcctctgttgtgtgcctgctgaataacttctatcccagagaggccaaagtacagtggaaggtggataacgccctccaatcgggtaactcccaggagagtgtcacagagcaggacagcaaggacagcacctacagcctcgagagcaccctgacgctgagcaaagcagactacgagaaacacaaagtctacgcctgcgaagtcacccatcagggcctgagctcgcccgtcacaaagagcttcaacaggggagagtgt

SEQ ID NO: 614 - DNA, 642 bp, synthetic construct
  misc_feature 1..642: note = source = /note="Description of Artificial Sequence: Synthetic polynucleotide"
  source 1..642: mol_type = other DNA
gatatccaaatgacacaatcaccatcgtcgctttcagcgtctgttggcgaccgtgtgacgattacctgtcgcgcgtcccagggaatccggaattacctcgcatggtatcagcaaaaacccggaaaagagccgaagctcctgatctatgccgcctcgactcttcagagtggtgtgccgtcgaggtttagcgggtccgggtcaggtacggactttactctcacaatttccagcctgcagcccgaagatgtagctacctattactgccagagatacaaccgagcgccttacacattcggacaagggacaaaagtcgagatcaagcgtacggtggctgcaccatctgtcttcatcttcccgccatctgatgagcagttgaaatctggaactgcctctgttgtgtgcctgctgaataacttctatcccagagaggccaaagtacagtggaaggtggataacgccctccaatcgggtaactcccaggagagtgtcacagagcaggacagcaaggacagcacctacagcctcaagagcaccctgacgctgagcaaagcagactacgagaaacacaaagtctacgcctgcgaagtcacccatcagggcctgagctcgcccgtcacaaagagcttcaacaggggagagtgt

SEQ ID NO: 615 - DNA, 2046 bp, synthetic construct
  misc_feature 1..2046: note = source = /note="Description of Artificial Sequence: Synthetic polynucleotide"
  source 1..2046: mol_type = other DNA
caggtgcagttacagcagtcgggcgcaggactgttgaagccttcggagaccctgtccctcacctgcgctgtccatggtgggtccttcagtggttactactggaactggatccgccagccaccagggaagaagctagagtggattggggaaatcaatcatgctggaaacaccaactacaacccgtccctcaagagtcgagtcaccatatcattagacacgtccaagaaccagttctccctgacgctgacctctgtgaccgccgcggacacggctgtgtattactgtgcgagaggatattgtagaagtaccacctgctactttgactactggggccagggaaccctagtcaccgtctcctcagcctccaccaagggcccatcggtcttccccctggcaccctcctccaagagcacctctgggggcacagcggccctgggctgcctggtcaaggactacttccccgaaccggtgacggtgtcgtggaactcaggcgccctgaccagcggcgtgcacaccttcccggctgtcctacagtcctcaggactctactccctcaaaagcgtggtgaccgtgccctccagcagcttgggcacccagacctacatctgcaacgtgaatcacaagcccagcaacaccaaggtggacaagaaagttgagcccaaatcttgtgacaaaactcacacatgcccaccgtgcccagcacctgaactcctggggggaccgtcagtcttcctcttccccccaaaacccaaggacaccctcatgatctcccggacccctgaggtcacatgcgtggtggtggacgtgagccacgaagaccctgaggtcaagttcaactggtacgtggacggcgtggaggtgcataatgccaagacaaagccgtgtgaggagcagtacggcagcacgtaccgttgtgtcagcgtcctcaccgtcctgcaccaggactggctgaatggcaaggagtacaagtgcaaggtctccaacaaagccctcccagcccccatcgagaaaaccatctccaaagccaaagggcagccccgagaaccacaggtgtacaccctgcccccatcccgggaggagatgaccaagaaccaggtcagcctgacctgcctggtcaaaggcttctatcccagcgacatcgccgtggagtgggagagcaatgggcagccggagaacaactacaagaccacgcctcccgtgctggactccgacggctccttcttcctctatagcaagctcaccgtggacaagagcaggtggcagcaggggaacgtcttctcatgctccgtgatgcatgaggctctgcacaaccactacacgcagaagagcctctccctgtctccgggtggtggcggatcgggaggtggcggatccgaggtacaactggtggaatcaggtggaggtttggtgcagccggggagatcgctcaggcttagctgtgcggcatcggggtttactttcgatgattatgcgatgcattgggtccggcaagcgcctggaaaagggctcgagtgggtttccgccattacgtggaatagcggacacatcgattatgcagacagtgtggagggcagattcacaatctcacgagacaatgctaagaacagcctgtaccttcagatgaactcacttcgcgcggaagataccgccgtatactactgcgccaaagtctcctacttgtctacagcttcgtcgctcgactattggggtaaaggaacgttggtcaccgtctctagtgcctccaccaagggcccatcggtcttccccctggcaccctcctccaagagcacctctgggggcacagcggccctgggctgcctggtcaaggactacttccccgaaccggtgacggtgtcgtggaactcaggcgccctgaccagcggcgtgcacaccttcccggctgtcctacagtcctcaggactctactccctcgagagcgtggtgaccgtgccctccagcagcttgggcacccagacctacatctgcaacgtgaatcacaagcccagcaacaccaaggtggacaagaaagttgagcccaaatcttgt

SEQ ID NO: 616 - protein, 214 aa, synthetic construct
  REGION 1..214: note = source = /note="Description of Artificial Sequence: Synthetic polypeptide"
EIVLTQSPGTLSLSPGERATLSCRASQSVRSSYLAWYQQKPGQAPRLLIYGASSRATGIPDRFSGSGSGTDFTLTISRLEPEDFAVYYCQQYGSSPTFGEGTRLEIKRTVAAPSVFIFPPSDEQLKSGTASVVCLLNNFYPREAKVQWKVDNALQSGNSQESVTEQDSKDSTYSLESTLTLSKADYEKHKVYACEVTHQGLSSPVTKSFNRGEC

SEQ ID NO: 617 - protein, 214 aa, synthetic construct
  REGION 1..214: note = source = /note="Description of Artificial Sequence: Synthetic polypeptide"
DIQMTQSPSSLSASVGDRVTITCRASQGIRNYLAWYQQKPGKEPKLLIYAASTLQSGVPSRFSGSGSGTDFTLTISSLQPEDVATYYCQRYNRAPYTFGQGTKVEIKRTVAAPSVFIFPPSDEQLKSGTASVVCLLNNFYPREAKVQWKVDNALQSGNSQESVTEQDSKDSTYSLKSTLTLSKADYEKHKVYACEVTHQGLSSPVTKSFNRGEC

SEQ ID NO: 618 - protein, 682 aa, synthetic construct
  REGION 1..682: note = source = /note="Description of Artificial Sequence: Synthetic polypeptide"
QVQLQQSGAGLLKPSETLSLTCAVHGGSFSGYYWNWIRQPPGKKLEWIGEINHAGNTNYNPSLKSRVTISLDTSKNQFSLTLTSVTAADTAVYYCARGYCRSTTCYFDYWGQGTLVTVSSASTKGPSVFPLAPSSKSTSGGTAALGCLVKDYFPEPVTVSWNSGALTSGVHTFPAVLQSSGLYSLKSVVTVPSSSLGTQTYICNVNHKPSNTKVDKKVEPKSCDKTHTCPPCPAPELLGGPSVFLFPPKPKDTLMISRTPEVTCVVVDVSHEDPEVKFNWYVDGVEVHNAKTKPCEEQYGSTYRCVSVLTVLHQDWLNGKEYKCKVSNKALPAPIEKTISKAKGQPREPQVYTLPPSREEMTKNQVSLTCLVKGFYPSDIAVEWESNGQPENNYKTTPPVLDSDGSFFLYSKLTVDKSRWQQGNVFSCSVMHEALHNHYTQKSLSLSPGGGGSGGGGSEVQLVESGGGLVQPGRSLRLSCAASGFTFDDYAMHWVRQAPGKGLEWVSAITWNSGHIDYADSVEGRFTISRDNAKNSLYLQMNSLRAEDTAVYYCAKVSYLSTASSLDYWGKGTLVTVSSASTKGPSVFPLAPSSKSTSGGTAALGCLVKDYFPEPVTVSWNSGALTSGVHTFPAVLQSSGLYSLESVVTVPSSSLGTQTYICNVNHKPSNTKVDKKVEPKSC

SEQ ID NO: 619 - DNA, 642 bp, synthetic construct; identical to SEQ ID NO: 613
  misc_feature 1..642: note = source = /note="Description of Artificial Sequence: Synthetic polynucleotide"
  source 1..642: mol_type = other DNA

SEQ ID NO: 620 - DNA, 651 bp, synthetic construct
  misc_feature 1..651: note = source = /note="Description of Artificial Sequence: Synthetic polynucleotide"
  source 1..651: mol_type = other DNA
cagtctgtgctgacgcagccgccctcagtgtctggggccccagggcagagggtcaccatctcctgcactgggagcagttccaacatcggggcaggttatgatgtacactggtaccagcagtttccaggaacagagcccaaactcctcatccaaggtaacagcaatcggccctcaggggtccctgaccgattctctggctccaagtctggcacctcagcctccctggccatcactgggctccaggctgaggatgaggctgattattactgccagtcctatgacagcagcctgagtggttcggtgttcggcggagggaccaagctgaccgtcctaggtcagcccaaggctgccccctcggtcactctgttcccgccctcctctgaggagcttcaagccaacaaggccacactggtgtgtctcataagtgacttctacccgggagccgtgacagtggcctggaaggcagatagcagccccgtcaaggcgggagtggagaccaccacaccctccaaacaaagcaacaacaagtacgcggccaagagctatctgagcctgacgcctgagcagtggaagtcccacagaagctacagctgccaggtcacgcatgaagggagcaccgtggagaagacagtggcccctacagaatgttca

SEQ ID NO: 621 - DNA, 2031 bp, synthetic construct
  misc_feature 1..2031: note = source = /note="Description of Artificial Sequence: Synthetic polynucleotide"
  source 1..2031: mol_type = other DNA
caggtgcagttacagcagtcgggcgcaggactgttgaagccttcggagaccctgtccctcacctgcgctgtccatggtgggtccttcagtggttactactggaactggatccgccagccaccagggaagaagctagagtggattggggaaatcaatcatgctggaaacaccaactacaacccgtccctcaagagtcgagtcaccatatcattagacacgtccaagaaccagttctccctgacgctgacctctgtgaccgccgcggacacggctgtgtattactgtgcgagaggatattgtagaagtaccacctgctactttgactactggggccagggaaccctagtcaccgtctcctcagcctccaccaagggcccatcggtcttccccctggcaccctcctccaagagcacctctgggggcacagcggccctgggctgcctggtcaaggactacttccccgaaccggtgacggtgtcgtggaactcaggcgccctgaccagcggcgtgcacaccttcccggctgtcctacagtcctcaggactctactccctcaaaagcgtggtgaccgtgccctccagcagcttgggcacccagacctacatctgcaacgtgaatcacaagcccagcaacaccaaggtggacaagaaagttgagcccaaatcttgtgacaaaactcacacatgcccaccgtgcccagcacctgaactcctggggggaccgtcagtcttcctcttccccccaaaacccaaggacaccctcatgatctcccggacccctgaggtcacatgcgtggtggtggacgtgagccacgaagaccctgaggtcaagttcaactggtacgtggacggcgtggaggtgcataatgccaagacaaagccgtgtgaggagcagtacggcagcacgtaccgttgtgtcagcgtcctcaccgtcctgcaccaggactggctgaatggcaaggagtacaagtgcaaggtctccaacaaagccctcccagcccccatcgagaaaaccatctccaaagccaaagggcagccccgagaaccacaggtgtacaccctgcccccatcccgggaggagatgaccaagaaccaggtcagcctgacctgcctggtcaaaggcttctatcccagcgacatcgccgtggagtgggagagcaatgggcagccggagaacaactacaagaccacgcctcccgtgctggactccgacggctccttcttcctctatagcaagctcaccgtggacaagagcaggtggcagcaggggaacgtcttctcatgctccgtgatgcatgaggctctgcacaaccactacacgcagaagagcctctccctgtctccgggtggtggcggatcgggaggtggcggatccgaggtgcagctggtgcagtctggagcagaggtgaaaaagcccggggagtctctgaagatctcctgtaagacttctgaatacagctttaccagctactggatcggctgggtgcgccagatgcccgggaaaggcctggagtggatggggatcatctatcttggtgactcagataccagatacagcccgtccttccaaggccaggtcaccatctcagccgacaagtccatcagtaccgcctacctgcagtggagcagcctgaaggcctcggacaccgccatgtattactgtgcgagaagtaactggggtcttgactactggggcaagggaaccctggtcaccgtctctagtgcctccaccaagggcccatcggtcttccccctggcaccctcctccaagagcacctctgggggcacagcggccctgggctgcctggtcaaggactacttccccgaaccggtgacggtgtcgtggaactcaggcgccctgaccagcggcgtgcacaccttcccggctgtcctacagtcctcaggactctactccctcgagagcgtggtgaccgtgccctccagcagcttgggcacccagacctacatctgcaacgtgaatcacaagcccagcaacaccaaggtggacaagaaagttgagcccaaatcttgt

SEQ ID NO: 622 - protein, 214 aa, synthetic construct; identical to SEQ ID NO: 616
  REGION 1..214: note = source = /note="Description of Artificial Sequence: Synthetic polypeptide"

SEQ ID NO: 623 - protein, 217 aa, synthetic construct
  REGION 1..217: note = source = /note="Description of Artificial Sequence: Synthetic polypeptide"
QSVLTQPPSVSGAPGQRVTISCTGSSSNIGAGYDVHWYQQFPGTEPKLLIQGNSNRPSGVPDRFSGSKSGTSASLAITGLQAEDEADYYCQSYDSSLSGSVFGGGTKLTVLGQPKAAPSVTLFPPSSEELQANKATLVCLISDFYPGAVTVAWKADSSPVKAGVETTTPSKQSNNKYAAKSYLSLTPEQWKSHRSYSCQVTHEGSTVEKTVAPTECS

SEQ ID NO: 624 - protein, 677 aa, synthetic construct
  REGION 1..677: note = source = /note="Description of Artificial Sequence: Synthetic polypeptide"
QVQLQQSGAGLLKPSETLSLTCAVHGGSFSGYYWNWIRQPPGKKLEWIGEINHAGNTNYNPSLKSRVTISLDTSKNQFSLTLTSVTAADTAVYYCARGYCRSTTCYFDYWGQGTLVTVSSASTKGPSVFPLAPSSKSTSGGTAALGCLVKDYFPEPVTVSWNSGALTSGVHTFPAVLQSSGLYSLKSVVTVPSSSLGTQTYICNVNHKPSNTKVDKKVEPKSCDKTHTCPPCPAPELLGGPSVFLFPPKPKDTLMISRTPEVTCVVVDVSHEDPEVKFNWYVDGVEVHNAKTKPCEEQYGSTYRCVSVLTVLHQDWLNGKEYKCKVSNKALPAPIEKTISKAKGQPREPQVYTLPPSREEMTKNQVSLTCLVKGFYPSDIAVEWESNGQPENNYKTTPPVLDSDGSFFLYSKLTVDKSRWQQGNVFSCSVMHEALHNHYTQKSLSLSPGGGGSGGGGSEVQLVQSGAEVKKPGESLKISCKTSEYSFTSYWIGWVRQMPGKGLEWMGIIYLGDSDTRYSPSFQGQVTISADKSISTAYLQWSSLKASDTAMYYCARSNWGLDYWGKGTLVTVSSASTKGPSVFPLAPSSKSTSGGTAALGCLVKDYFPEPVTVSWNSGALTSGVHTFPAVLQSSGLYSLESVVTVPSSSLGTQTYICNVNHKPSNTKVDKKVEPKSC

SEQ ID NO: 625 - DNA, 642 bp, synthetic construct
  misc_feature 1..642: note = source = /note="Description of Artificial Sequence: Synthetic polynucleotide"
  source 1..642: mol_type = other DNA
gacatccagatgacccagtctccatcctccctgtctgcatctgtaggagacagagtcaccatcacttgccgggcaagtcagagcattaacaactatttaaattggtatcagcagagaccagggaaagcccctaagctcctgatctatgctgcatccagtttgcaaagtggggtcccatcaaggttcagtggcagtggatctgggacagatttcactctcaccatcagcagtctgcaacctgaagattttgcaacttactactgtcaacagagttacagtacccctcggacgttcggcgaggggaccaagctggaaatcaaacgaacggtggctgcaccatctgtcttcatcttcccgccatctgatgagcagttgaaatctggtaccgcctctgttgtgtgcctgctgaataacttctatcccagagaggccaaagtacagtggaaggtggataacgccctccaatcgggtaactcccaggagagtgtcacagagcaggacagcaaggacagcacctacagcctcgagagcaccctgacgctgagcaaagcagactacgagaaacacaaagtctacgcctgcgaagtcacccatcagggcctgagctcgcccgtcacaaagagcttcaacaggggagagtgt

SEQ ID NO: 626 - DNA, 642 bp, synthetic construct; identical to SEQ ID NO: 614
  misc_feature 1..642: note = source = /note="Description of Artificial Sequence: Synthetic polynucleotide"
  source 1..642: mol_type = other DNA

SEQ ID NO: 627 - DNA, 2040 bp, synthetic construct
  misc_feature 1..2040: note = source = /note="Description of Artificial Sequence: Synthetic polynucleotide"
  source 1..2040: mol_type = other DNA
caggtgcagctgcaggagtcgggcccaggactggtgaagccttcggagaccctgtccctcacctgcactgtctctggtggctccatcagtagttacttctggagctggatccggcagcccccaggtaagaaactggagtggattggctatatctattacagtgggcagaccaaatacaacccctccctcaagagtcgagtcaccatatcaatagacacgtccaagaaccagttctccctgaagctgagctctgtgaccgctgcggacacggccgtgtattactgtgcgagagaaactgggagctactacggctttgactactggggccagggaaccctggtcaccgtctcctcagcctccaccaagggcccatcggtcttccccctggcaccctcctccaagagcacctctgggggcacagcggccctgggctgcctggtcaaggactacttccccgaaccggtgacggtgtcgtggaactcaggcgccctgaccagcggcgtgcacaccttcccggctgtcctacagtcctcaggactctactccctcaaaagcgtggtgaccgtgccctccagcagcttgggcacccagacctacatctgcaacgtgaatcacaagcccagcaacaccaaggtggacaagaaagttgagcccaaatcttgtgacaaaactcacacatgcccaccgtgcccagcacctgaactcctggggggaccgtcagtcttcctcttccccccaaaacccaaggacaccctcatgatctcccggacccctgaggtcacatgcgtggtggtggacgtgagccacgaagaccctgaggtcaagttcaactggtacgtggacggcgtggaggtgcataatgccaagacaaagccgtgtgaggagcagtacggcagcacgtaccgttgtgtcagcgtcctcaccgtcctgcaccaggactggctgaatggcaaggagtacaagtgcaaggtctccaacaaagccctcccagcccccatcgagaaaaccatctccaaagccaaagggcagccccgagaaccacaggtgtacaccctgcccccatcccgggaggagatgaccaagaaccaggtcagcctgacctgcctggtcaaaggcttctatcccagcgacatcgccgtggagtgggagagcaatgggcagccggagaacaactacaagaccacgcctcccgtgctggactccgacggctccttcttcctctatagcaagctcaccgtggacaagagcaggtggcagcaggggaacgtcttctcatgctccgtgatgcatgaggctctgcacaaccactacacgcagaagagcctctccctgtctccgggtggtggcggatcgggaggtggcggatccgaggtacaactggtggaatcaggtggaggtttggtgcagccggggagatcgctcaggcttagctgtgcggcatcggggtttactttcgatgattatgcgatgcattgggtccggcaagcgcctggaaaagggctcgagtgggtttccgccattacgtggaatagcggacacatcgattatgcagacagtgtggagggcagattcacaatctcacgagacaatgctaagaacagcctgtaccttcagatgaactcacttcgcgcggaagataccgccgtatactactgcgccaaagtctcctacttgtctacagcttcgtcgctcgactattggggtaaaggaacgttggtcaccgtctctagtgcctccaccaagggcccatcggtcttccccctggcaccctcctccaagagcacctctgggggcacagcggccctgggctgcctggtcaaggactacttccccgaaccggtgacggtgtcgtggaactcaggcgccctgaccagcggcgtgcacaccttcccggctgtcctacagtcctcaggactctactccctcgagagcgtggtgaccgtgccctccagcagcttgggcacccagacctacatctgcaacgtgaatcacaagcccagcaacaccaaggtggacaagaaagttgagcccaaatcttgt

SEQ ID NO: 628 - protein, 214 aa, synthetic construct
  REGION 1..214: note = source = /note="Description of Artificial Sequence: Synthetic polypeptide"
DIQMTQSPSSLSASVGDRVTITCRASQSINNYLNWYQQRPGKAPKLLIYAASSLQSGVPSRFSGSGSGTDFTLTISSLQPEDFATYYCQQSYSTPRTFGEGTKLEIKRTVAAPSVFIFPPSDEQLKSGTASVVCLLNNFYPREAKVQWKVDNALQSGNSQESVTEQDSKDSTYSLESTLTLSKADYEKHKVYACEVTHQGLSSPVTKSFNRGEC

SEQ ID NO: 629 - protein, 214 aa, synthetic construct; identical to SEQ ID NO: 617
  REGION 1..214: note = source = /note="Description of Artificial Sequence: Synthetic polypeptide"

SEQ ID NO: 630 - protein, 680 aa, synthetic construct
  REGION 1..680: note = source = /note="Description of Artificial Sequence: Synthetic polypeptide"
QVQLQESGPGLVKPSETLSLTCTVSGGSISSYFWSWIRQPPGKKLEWIGYIYYSGQTKYNPSLKSRVTISIDTSKNQFSLKLSSVTAADTAVYYCARETGSYYGFDYWGQGTLVTVSSASTKGPSVFPLAPSSKSTSGGTAALGCLVKDYFPEPVTVSWNSGALTSGVHTFPAVLQSSGLYSLKSVVTVPSSSLGTQTYICNVNHKPSNTKVDKKVEPKSCDKTHTCPPCPAPELLGGPSVFLFPPKPKDTLMISRTPEVTCVVVDVSHEDPEVKFNWYVDGVEVHNAKTKPCEEQYGSTYRCVSVLTVLHQDWLNGKEYKCKVSNKALPAPIEKTISKAKGQPREPQVYTLPPSREEMTKNQVSLTCLVKGFYPSDIAVEWESNGQPENNYKTTPPVLDSDGSFFLYSKLTVDKSRWQQGNVFSCSVMHEALHNHYTQKSLSLSPGGGGSGGGGSEVQLVESGGGLVQPGRSLRLSCAASGFTFDDYAMHWVRQAPGKGLEWVSAITWNSGHIDYADSVEGRFTISRDNAKNSLYLQMNSLRAEDTAVYYCAKVSYLSTASSLDYWGKGTLVTVSSASTKGPSVFPLAPSSKSTSGGTAALGCLVKDYFPEPVTVSWNSGALTSGVHTFPAVLQSSGLYSLESVVTVPSSSLGTQTYICNVNHKPSNTKVDKKVEPKSC

SEQ ID NO: 631 - DNA, 642 bp, synthetic construct; identical to SEQ ID NO: 625
  misc_feature 1..642: note = source = /note="Description of Artificial Sequence: Synthetic polynucleotide"
  source 1..642: mol_type = other DNA

SEQ ID NO: 632 - DNA, 651 bp, synthetic construct; identical to SEQ ID NO: 620
  misc_feature 1..651: note = source = /note="Description of Artificial Sequence: Synthetic polynucleotide"
  source 1..651: mol_type = other DNA

SEQ ID NO: 633 - DNA, 2025 bp, synthetic construct
  misc_feature 1..2025: note = source = /note="Description of Artificial Sequence: Synthetic polynucleotide"
  source 1..2025: mol_type = other DNA
caggtgcagctgcaggagtcgggcccaggactggtgaagccttcggagaccctgtccctcacctgcactgtctctggtggctccatcagtagttacttctggagctggatccggcagcccccaggtaagaaactggagtggattggctatatctattacagtgggcagaccaaatacaacccctccctcaagagtcgagtcaccatatcaatagacacgtccaagaaccagttctccctgaagctgagctctgtgaccgctgcggacacggccgtgtattactgtgcgagagaaactgggagctactacggctttgactactggggccagggaaccctggtcaccgtctcctcagcctccaccaagggcccatcggtcttccccctggcaccctcctccaagagcacctctgggggcacagcggccctgggctgcctggtcaaggactacttccccgaaccggtgacggtgtcgtggaactcaggcgccctgaccagcggcgtgcacaccttcccggctgtcctacagtcctcaggactctactccctcaaaagcgtggtgaccgtgccctccagcagcttgggcacccagacctacatctgcaacgtgaatcacaagcccagcaacaccaaggtggacaagaaagttgagcccaaatcttgtgacaaaactcacacatgcccaccgtgcccagcacctgaactcctggggggaccgtcagtcttcctcttccccccaaaacccaaggacaccctcatgatctcccggacccctgaggtcacatgcgtggtggtggacgtgagccacgaagaccctgaggtcaagttcaactggtacgtggacggcgtggaggtgcataatgccaagacaaagccgtgtgaggagcagtacggcagcacgtaccgttgtgtcagcgtcctcaccgtcctgcaccaggactggctgaatggcaaggagtacaagtgcaaggtctccaacaaagccctcccagcccccatcgagaaaaccatctccaaagccaaagggcagccccgagaaccacaggtgtacaccctgcccccatcccgggaggagatgaccaagaaccaggtcagcctgacctgcctggtcaaaggcttctatcccagcgacatcgccgtggagtgggagagcaatgggcagccggagaacaactacaagaccacgcctcccgtgctggactccgacggctccttcttcctctatagcaagctcaccgtggacaagagcaggtggcagcaggggaacgtcttctcatgctccgtgatgcatgaggctctgcacaaccactacacgcagaagagcctctccctgtctccgggtggtggcggatcgggaggtggcggatccgaggtgcagctggtgcagtctggagcagaggtgaaaaagcccggggagtctctgaagatctcctgtaagacttctgaatacagctttaccagctactggatcggctgggtgcgccagatgcccgggaaaggcctggagtggatggggatcatctatcttggtgactcagataccagatacagcccgtccttccaaggccaggtcaccatctcagccgacaagtccatcagtaccgcctacctgcagtggagcagcctgaaggcctcggacaccgccatgtattactgtgcgagaagtaactggggtcttgactactggggcaagggaaccctggtcaccgtctctagtgcctccaccaagggcccatcggtcttccccctggcaccctcctccaagagcacctctgggggcacagcggccctgggctgcctggtcaaggactacttccccgaaccggtgacggtgtcgtggaactcaggcgccctgaccagcggcgtgcacaccttcccggctgtcctacagtcctcaggactctactccctcgagagcgtggtgaccgtgccctccagcagcttgggcacccagacctacatctgcaacgtgaatcacaagcccagcaacaccaaggtggacaagaaagttgagcccaaatcttgt

SEQ ID NO: 634 - protein, 214 aa, synthetic construct; identical to SEQ ID NO: 628
  REGION 1..214: note = source = /note="Description of Artificial Sequence: Synthetic polypeptide"

SEQ ID NO: 635 - protein, 217 aa, synthetic construct; identical to SEQ ID NO: 623
  REGION 1..217: note = source = /note="Description of Artificial Sequence: Synthetic polypeptide"

SEQ ID NO: 636 - protein, 675 aa, synthetic construct
  REGION 1..675: note = source = /note="Description of Artificial Sequence: Synthetic polypeptide"
QVQLQESGPGLVKPSETLSLTCTVSGGSISSYFWSWIRQPPGKKLEWIGYIYYSGQTKYNPSLKSRVTISIDTSKNQFSLKLSSVTAADTAVYYCARETGSYYGFDYWGQGTLVTVSSASTKGPSVFPLAPSSKSTSGGTAALGCLVKDYFPEPVTVSWNSGALTSGVHTFPAVLQSSGLYSLKSVVTVPSSSLGTQTYICNVNHKPSNTKVDKKVEPKSCDKTHTCPPCPAPELLGGPSVFLFPPKPKDTLMISRTPEVTCVVVDVSHEDPEVKFNWYVDGVEVHNAKTKPCEEQYGSTYRCVSVLTVLHQDWLNGKEYKCKVSNKALPAPIEKTISKAKGQPREPQVYTLPPSREEMTKNQVSLTCLVKGFYPSDIAVEWESNGQPENNYKTTPPVLDSDGSFFLYSKLTVDKSRWQQGNVFSCSVMHEALHNHYTQKSLSLSPGGGGSGGGGSEVQLVQSGAEVKKPGESLKISCKTSEYSFTSYWIGWVRQMPGKGLEWMGIIYLGDSDTRYSPSFQGQVTISADKSISTAYLQWSSLKASDTAMYYCARSNWGLDYWGKGTLVTVSSASTKGPSVFPLAPSSKSTSGGTAALGCLVKDYFPEPVTVSWNSGALTSGVHTFPAVLQSSGLYSLESVVTVPSSSLGTQTYICNVNHKPSNTKVDKKVEPKSC

SEQ ID NO: 637 - DNA, 660 bp, synthetic construct
  misc_feature 1..660: note = source = /note="Description of Artificial Sequence: Synthetic polynucleotide"
  source 1..660: mol_type = other DNA
gacatccagatgacccagtctccaagctccctgtctgcgtctgtgggcgatagggtcaccatcacttgcaggtccagccagagtgtgttatacagctccaacaataagaactacttagtttggtaccagcagaaaccaggaaaggttcctaaactgctcatttactgggcatctacccgggaatccggggtccctagtcgattcagtggcagcgggtctgggacagatttcactctcaccatcagcagcctgcagcctgaagatgtggcaacttattactgtcagcaatattataagactcctctcactttcggcgaggggaccaaggtggagatcaaacgaacggtggctgcaccatctgtcttcatcttcccgccatctgatgagcagttgaaatctggtaccgcctctgttgtgtgcctgctgaataacttctatcccagagaggccaaagtacagtggaaggtggataacgccctccaatcgggtaactcccaggagagtgtcacagagcaggacagcaaggacagcacctacagcctcgagagcaccctgacgctgagcaaagcagactacgagaaacacaaagtctacgcctgcgaagtcacccatcagggcctgagctcgcccgtcacaaagagcttcaacaggggagagtgt

SEQ ID NO: 638 - DNA, 642 bp, synthetic construct; identical to SEQ ID NO: 614
  misc_feature 1..642: note = source = /note="Description of Artificial Sequence: Synthetic polynucleotide"
  source 1..642: mol_type = other DNA

SEQ ID NO: 639 - DNA, 2061 bp, synthetic construct
  misc_feature 1..2061: note = source = /note="Description of Artificial Sequence: Synthetic polynucleotide"
  source 1..2061: mol_type = other DNA
caggtacagttgcaggagtcaggtccaggactggtgaagccctcggagaccctctcactcacctgtaccatctccggggacagtgtctctaccaacagtgttgcttggaactggatcaggcagcccccagggaaaaaacttgagtggataggaaggacatactacaggtccaagtggtataatgattatgcagtttctctgaaaagtcgagtaaccatcagcccagacacatccaagaaccagttctccctgaagctgagctctgtgactgccgcggacacggctgtgtattactgtgcaagagaggatggggatagctactaccgctacggtatggacgtctggggccaagggaccacggtcaccgtctcctcagcctccaccaagggcccatcggtcttccccctggcaccctcctccaagagcacctctgggggcacagcggccctgggctgcctggtcaaggactacttccccgaaccggtgacggtgtcgtggaactcaggcgccctgaccagcggcgtgcacaccttcccggctgtcctacagtcctcaggactctactccctcaaaagcgtggtgaccgtgccctccagcagcttgggcacccagacctacatctgcaacgtgaatcacaagcccagcaacaccaaggtggacaagaaagttgagcccaaatcttgtgacaaaactcacacatgcccaccgtgcccagcacctgaactcctggggggaccgtcagtcttcctcttccccccaaaacccaaggacaccctcatgatctcccggacccctgaggtcacatgcgtggtggtggacgtgagccacgaagaccctgaggtcaagttcaactggtacgtggacggcgtggaggtgcataatgccaagacaaagccgtgtgaggagcagtacggcagcacgtaccgttgtgtcagcgtcctcaccgtcctgcaccaggactggctgaatggcaaggagtacaagtgcaaggtctccaacaaagccctcccagcccccatcgagaaaaccatctccaaagccaaagggcagccccgagaaccacaggtgtacaccctgcccccatcccgggaggagatgaccaagaaccaggtcagcctgacctgcctggtcaaaggcttctatcccagcgacatcgccgtggagtgggagagcaatgggcagccggagaacaactacaagaccacgcctcccgtgctggactccgacggctccttcttcctctatagcaagctcaccgtggacaagagcaggtggcagcaggggaacgtcttctcatgctccgtgatgcatgaggctctgcacaaccactacacgcagaagagcctctccctgtctccgggtggtggcggatcgggaggtggcggatccgaggtacaactggtggaatcaggtggaggtttggtgcagccggggagatcgctcaggcttagctgtgcggcatcggggtttactttcgatgattatgcgatgcattgggtccggcaagcgcctggaaaagggctcgagtgggtttccgccattacgtggaatagcggacacatcgattatgcagacagtgtggagggcagattcacaatctcacgagacaatgctaagaacagcctgtaccttcagatgaactcacttcgcgcggaagataccgccgtatactactgcgccaaagtctcctacttgtctacagcttcgtcgctcgactattggggtaaaggaacgttggtcaccgtctctagtgcctccaccaagggcccatcggtcttccccctggcaccctcctccaagagcacctctgggggcacagcggccctgggctgcctggtcaaggactacttccccgaaccggtgacggtgtcgtggaactcaggcgccctgaccagcggcgtgcacaccttcccggctgtcctacagtcctcaggactctactccctcgagagcgtggtgaccgtgccctccagcagcttgggcacccagacctacatctgcaacgtgaatcacaagcccagcaacaccaaggtggacaagaaagttgagcccaaatcttgt

SEQ ID NO: 640 - protein, 220 aa, synthetic construct
  REGION 1..220: note = source = /note="Description of Artificial Sequence: Synthetic polypeptide"
DIQMTQSPSSLSASVGDRVTITCRSSQSVLYSSNNKNYLVWYQQKPGKVPKLLIYWASTRESGVPSRFSGSGSGTDFTLTISSLQPEDVATYYCQQYYKTPLTFGEGTKVEIKRTVAAPSVFIFPPSDEQLKSGTASVVCLLNNFYPREAKVQWKVDNALQSGNSQESVTEQDSKDSTYSLESTLTLSKADYEKHKVYACEVTHQGLSSPVTKSFNRGEC

SEQ ID NO: 641 - protein, 214 aa, synthetic construct; identical to SEQ ID NO: 617
  REGION 1..214: note = source = /note="Description of Artificial Sequence: Synthetic polypeptide"

SEQ ID NO: 642 - protein, 687 aa, synthetic construct
  REGION 1..687: note = source = /note="Description of Artificial Sequence: Synthetic polypeptide"
QVQLQESGPGLVKPSETLSLTCTISGDSVSTNSVAWNWIRQPPGKKLEWIGRTYYRSKWYNDYAVSLKSRVTISPDTSKNQFSLKLSSVTAADTAVYYCAREDGDSYYRYGMDVWGQGTTVTVSSASTKGPSVFPLAPSSKSTSGGTAALGCLVKDYFPEPVTVSWNSGALTSGVHTFPAVLQSSGLYSLKSVVTVPSSSLGTQTYICNVNHKPSNTKVDKKVEPKSCDKTHTCPPCPAPELLGGPSVFLFPPKPKDTLMISRTPEVTCVVVDVSHEDPEVKFNWYVDGVEVHNAKTKPCEEQYGSTYRCVSVLTVLHQDWLNGKEYKCKVSNKALPAPIEKTISKAKGQPREPQVYTLPPSREEMTKNQVSLTCLVKGFYPSDIAVEWESNGQPENNYKTTPPVLDSDGSFFLYSKLTVDKSRWQQGNVFSCSVMHEALHNHYTQKSLSLSPGGGGSGGGGSEVQLVESGGGLVQPGRSLRLSCAASGFTFDDYAMHWVRQAPGKGLEWVSAITWNSGHIDYADSVEGRFTISRDNAKNSLYLQMNSLRAEDTAVYYCAKVSYLSTASSLDYWGKGTLVTVSSASTKGPSVFPLAPSSKSTSGGTAALGCLVKDYFPEPVTVSWNSGALTSGVHTFPAVLQSSGLYSLESVVTVPSSSLGTQTYICNVNHKPSNTKVDKKVEPKSC

SEQ ID NO: 643 - DNA, 660 bp, synthetic construct; identical to SEQ ID NO: 637
  misc_feature 1..660: note = source = /note="Description of Artificial Sequence: Synthetic polynucleotide"
  source 1..660: mol_type = other DNA

SEQ ID NO: 644 - DNA, 651 bp, synthetic construct; identical to SEQ ID NO: 620
  misc_feature 1..651: note = source = /note="Description of Artificial Sequence: Synthetic polynucleotide"
  source 1..651: mol_type = other DNA

SEQ ID NO: 645 - DNA, 2046 bp, synthetic construct
  misc_feature 1..2046: note = source = /note="Description of Artificial Sequence: Synthetic polynucleotide"
  source 1..2046: mol_type = other DNA
caggtacagttgcaggagtcaggtccaggactggtgaagccctcggagaccctctcactcacctgtaccatctccggggacagtgtctctaccaacagtgttgcttggaactggatcaggcagcccccagggaaaaaacttgagtggataggaaggacatactacaggtccaagtggtataatgattatgcagtttctctgaaaagtcgagtaaccatcagcccagacacatccaagaaccagttctccctgaagctgagctctgtgactgccgcggacacggctgtgtattactgtgcaagagaggatggggatagctactaccgctacggtatggacgtctggggccaagggaccacggtcaccgtctcctcagcctccaccaagggcccatcggtcttccccctggcaccctcctccaagagcacctctgggggcacagcggccctgggctgcctggtcaaggactacttccccgaaccggtgacggtgtcgtggaactcaggcgccctgaccagcggcgtgcacaccttcccggctgtcctacagtcctcaggactctactccctcaaaagcgtggtgaccgtgccctccagcagcttgggcacccagacctacatctgcaacgtgaatcacaagcccagcaacaccaaggtggacaagaaagttgagcccaaatcttgtgacaaaactcacacatgcccaccgtgcccagcacctgaactcctggggggaccgtcagtcttcctcttccccccaaaacccaaggacaccctcatgatctcccggacccctgaggtcacatgcgtggtggtggacgtgagccacgaagaccctgaggtcaagttcaactggtacgtggacggcgtggaggtgcataatgccaagacaaagccgtgtgaggagcagtacggcagcacgtaccgttgtgtcagcgtcctcaccgtcctgcaccaggactggctgaatggcaaggagtacaagtgcaaggtctccaacaaagccctcccagcccccatcgagaaaaccatctccaaagccaaagggcagccccgagaaccacaggtgtacaccctgcccccatcccgggaggagatgaccaagaaccaggtcagcctgacctgcctggtcaaaggcttctatcccagcgacatcgccgtggagtgggagagcaatgggcagccggagaacaactacaagaccacgcctcccgtgctggactccgacggctccttcttcctctatagcaagctcaccgtggacaagagcaggtggcagcaggggaacgtcttctcatgctccgtgatgcatgaggctctgcacaaccactacacgcagaagagcctctccctgtctccgggtggtggcggatcgggaggtggcggatccgaggtgcagctggtgcagtctggagcagaggtgaaaaagcccggggagtctctgaagatctcctgtaagacttctgaatacagctttaccagctactggatcggctgggtgcgccagatgcccgggaaaggcctggagtggatggggatcatctatcttggtgactcagataccagatacagcccgtccttccaaggccaggtcaccatctcagccgacaagtccatcagtaccgcctacctgcagtggagcagcctgaaggcctcggacaccgccatgtattactgtgcgagaagtaactggggtcttgactactggggcaagggaaccctggtcaccgtctctagtgcctccaccaagggcccatcggtcttccccctggcaccctcctccaagagcacctctgggggcacagcggccctgggctgcctggtcaaggactacttccccgaaccggtgacggtgtcgtggaactcaggcgccctgaccagcggcgtgcacaccttcccggctgtcctacagtcctcaggactctactccctcgagagcgtggtgaccgtgccctccagcagcttgggcacccagacctacatctgcaacgtgaatcacaagcccagcaacaccaaggtggacaagaaagttgagcccaaatcttgt

SEQ ID NO: 646 - protein, 220 aa, synthetic construct; identical to SEQ ID NO: 640
  REGION 1..220: note = source = /note="Description of Artificial Sequence: Synthetic polypeptide"

SEQ ID NO: 647 - protein, 217 aa, synthetic construct; identical to SEQ ID NO: 623
  REGION 1..217: note = source = /note="Description of Artificial Sequence: Synthetic polypeptide"

SEQ ID NO: 648 - protein, 682 aa, synthetic construct
  REGION 1..682: note = source = /note="Description of Artificial Sequence: Synthetic polypeptide"
QVQLQESGPGLVKPSETLSLTCTISGDSVSTNSVAWNWIRQPPGKKLEWIGRTYYRSKWYNDYAVSLKSRVTISPDTSKNQFSLKLSSVTAADTAVYYCAREDGDSYYRYGMDVWGQGTTVTVSSASTKGPSVFPLAPSSKSTSGGTAALGCLVKDYFPEPVTVSWNSGALTSGVHTFPAVLQSSGLYSLKSVVTVPSSSLGTQTYICNVNHKPSNTKVDKKVEPKSCDKTHTCPPCPAPELLGGPSVFLFPPKPKDTLMISRTPEVTCVVVDVSHEDPEVKFNWYVDGVEVHNAKTKPCEEQYGSTYRCVSVLTVLHQDWLNGKEYKCKVSNKALPAPIEKTISKAKGQPREPQVYTLPPSREEMTKNQVSLTCLVKGFYPSDIAVEWESNGQPENNYKTTPPVLDSDGSFFLYSKLTVDKSRWQQGNVFSCSVMHEALHNHYTQKSLSLSPGGGGSGGGGSEVQLVQSGAEVKKPGESLKISCKTSEYSFTSYWIGWVRQMPGKGLEWMGIIYLGDSDTRYSPSFQGQVTISADKSISTAYLQWSSLKASDTAMYYCARSNWGLDYWGKGTLVTVSSASTKGPSVFPLAPSSKSTSGGTAALGCLVKDYFPEPVTVSWNSGALTSGVHTFPAVLQSSGLYSLESVVTVPSSSLGTQTYICNVNHKPSNTKVDKKVEPKSC

SEQ ID NO: 649 - DNA, 642 bp, synthetic construct; identical to SEQ ID NO: 578
  misc_feature 1..642: note = source = /note="Description of Artificial Sequence: Synthetic polynucleotide"
  source 1..642: mol_type = other DNA

SEQ ID NO: 650 - DNA, 2055 bp, synthetic construct
  misc_feature 1..2055: note = source = /note="Description of Artificial Sequence: Synthetic polynucleotide"
  source 1..2055: mol_type = other DNA
gaggtacaactggtggaatcaggtggaggtttggtgcagccggggagatcgctcaggcttagctgtgcggcatcggggtttactttcgatgattatgcgatgcattgggtccggcaagcgcctggaaaaaagctcgagtgggtttccgccattacgtggaatagcggacacatcgattatgcagacagtgtggagggcagattcacaatctcacgagacaatgctaagaacagcctgtaccttcagatgaactcacttcgcgcggaagataccgccgtatactactgcgccaaagtctcctacttgtctacagcttcgtcgctcgactattggggtcaaggaacgttggtcaccgtctctagtacggtggctgcaccatctgtcttcatcttcccgccatctgatgagcagttgaaatctggaactgcctctgttgtgtgcctgctgaataacttctatcccagagaggccaaagtacagtggaaggtggataacgccctccaatcgggtaactcccaggagagtgtcacagagcaggacagcaaggacagcacctacagcctcaagagcaccctgacgctgagcaaagcagactacgagaaacacaaagtctacgcctgcgaagtcacccatcagggcctgagctcgcccgtcacaaagagcttcaacaggggagagtgtgacaaaactcacacatgcccaccgtgcccagcacctgaactcctggggggaccgtcagtcttcctcttccccccaaaacccaaggacaccctcatgatctcccggacccctgaggtcacatgcgtggtggtggacgtgagccacgaagaccctgaggtcaagttcaactggtacgtggacggcgtggaggtgcataatgccaagacaaagccgtgtgaggagcagtacggcagcacgtaccgttgtgtcagcgtcctcaccgtcctgcaccaggactggctgaatggcaaggagtacaagtgcaaggtctccaacaaagccctcccagcccccatcgagaaaaccatctccaaagccaaagggcagccccgagaaccacaggtgtacaccctgcccccatcccgggaggagatgaccaagaaccaggtcagcctgacctgcctggtcaaaggcttctatcccagcgacatcgccgtggagtgggagagcaatgggcagccggagaacaactacaagaccacgcctcccgtgctggactccgacggctccttcttcctctatagcaagctcaccgtggacaagagcaggtggcagcaggggaacgtcttctcatgctccgtgatgcatgaggctctgcacaaccactacacgcagaagagcctctccctgtctccgggtggtggcggatcgggaggtggcggatcccaggtgcagttacagcagtcgggcgcaggactgttgaagccttcggagaccctgtccctcacctgcgctgtccatggtgggtccttcagtggttactactggaactggattcgccagccaccagggaaggggctagagtggattggggaaatcaatcatgctggaaacaccaactacaacccgtccctcaagagtcgagtcaccatatcattagacacgtccaagaaccagttctccctgacgctgacctctgtgaccgccgcggacacggctgtgtattactgtgcgagaggatattgtagaagtaccacctgctactttgactactggggcaagggaaccctagtcaccgtctcctcagcctccaccaagggcccatcggtcttccccctggcaccctcctccaagagcacctctgggggcacagcggccctgggctgcctggtcaaggactacttccccgaaccggtgacggtgtcgtggaactcaggcgccctgaccagcggcgtgcacaccttcccggctgtcctacagtcctcaggactctactccctcgagagcgtggtgaccgtgccctccagcagcttgggcacccagacctacatctgcaacgtgaatcacaagcccagcaacaccaaggtggacaagaaagttgagcccaaatcttgt

SEQ ID NO: 651 - DNA, 633 bp, synthetic construct
  misc_feature 1..633: note = source = /note="Description of Artificial Sequence: Synthetic polynucleotide"
  source 1..633: mol_type = other DNA
gatatccaaatgacacaatcaccatcgtcgctttcagcgtctgttggcgaccgtgtgacgattacctgtcgcgcgtcccagggaatccggaattacctcgcatggtatcagcaaaaacccggaaaagcaccgaagctcctgatctatgccgcctcgactcttcagagtggtgtgccgtcgaggtttagcgggtccgggtcaggtacggactttactctcacaatttccagcctgcagcccgaagatgtagctacctattactgccagagatacaaccgagcgccttacacattcggagaagggacaaaagtcgagatcaagcgtgcctccaccaagggcccatcggtcttccccctggcaccctcctccaagagcacctctgggggcacagcggccctgggctgcctggtcaaggactacttccccgaaccggtgacggtgtcgtggaactcaggcgccctgaccagcggcgtgcacaccttcccggctgtcctacagtcctcaggactctactccctcgaaagcgtggtgaccgtgccctccagcagcttgggcacccagacctacatctgcaacgtgaatcacaagcccagcaacaccaaggtggacaagaaagttgagcccaaatcttgt

SEQ ID NO: 652 - protein, 214 aa, synthetic construct; identical to SEQ ID NO: 581
  REGION 1..214: note = source = /note="Description of Artificial Sequence: Synthetic polypeptide"

SEQ ID NO: 653 - protein, 685 aa, synthetic construct
  REGION 1..685: note = source = /note="Description of Artificial Sequence: Synthetic polypeptide"
EVQLVESGGGLVQPGRSLRLSCAASGFTFDDYAMHWVRQAPGKKLEWVSAITWNSGHIDYADSVEGRFTISRDNAKNSLYLQMNSLRAEDTAVYYCAKVSYLSTASSLDYWGQGTLVTVSSTVAAPSVFIFPPSDEQLKSGTASVVCLLNNFYPREAKVQWKVDNALQSGNSQESVTEQDSKDSTYSLKSTLTLSKADYEKHKVYACEVTHQGLSSPVTKSFNRGECDKTHTCPPCPAPELLGGPSVFLFPPKPKDTLMISRTPEVTCVVVDVSHEDPEVKFNWYVDGVEVHNAKTKPCEEQYGSTYRCVSVLTVLHQDWLNGKEYKCKVSNKALPAPIEKTISKAKGQPREPQVYTLPPSREEMTKNQVSLTCLVKGFYPSDIAVEWESNGQPENNYKTTPPVLDSDGSFFLYSKLTVDKSRWQQGNVFSCSVMHEALHNHYTQKSLSLSPGGGGSGGGGSQVQLQQSGAGLLKPSETLSLTCAVHGGSFSGYYWNWIRQPPGKGLEWIGEINHAGNTNYNPSLKSRVTISLDTSKNQFSLTLTSVTAADTAVYYCARGYCRSTTCYFDYWGKGTLVTVSSASTKGPSVFPLAPSSKSTSGGTAALGCLVKDYFPEPVTVSWNSGALTSGVHTFPAVLQSSGLYSLESVVTVPSSSLGTQTYICNVNHKPSNTKVDKKVEPKSC

SEQ ID NO: 654 - protein, 211 aa, synthetic construct
  REGION 1..211: note = source = /note="Description of Artificial Sequence: Synthetic polypeptide"
DIQMTQSPSSLSASVGDRVTITCRASQGIRNYLAWYQQKPGKAPKLLIYAASTLQSGVPSRFSGSGSGTDFTLTISSLQPEDVATYYCQRYNRAPYTFGEGTKVEIKRASTKGPSVFPLAPSSKSTSGGTAALGCLVKDYFPEPVTVSWNSGALTSGVHTFPAVLQSSGLYSLESVVTVPSSSLGTQTYICNVNHKPSNTKVDKKVEPKSC

SEQ ID NO: 655 - DNA, 642 bp, synthetic construct; identical to SEQ ID NO: 584
  misc_feature 1..642: note = source = /note="Description of Artificial Sequence: Synthetic polynucleotide"
  source 1..642: mol_type = other DNA

SEQ ID NO: 656 - DNA, 2049 bp, synthetic construct
  misc_feature 1..2049: note = source = /note="Description of Artificial Sequence: Synthetic polynucleotide"
  source 1..2049: mol_type = other DNA
gaggtacaactggtggaatcaggtggaggtttggtgcagccggggagatcgctcaggcttagctgtgcggcatcggggtttactttcgatgattatgcgatgcattgggtccggcaagcgcctggaaaaaagctcgagtgggtttccgccattacgtggaatagcggacacatcgattatgcagacagtgtggagggcagattcacaatctcacgagacaatgctaagaacagcctgtaccttcagatgaactcacttcgcgcggaagataccgccgtatactactgcgccaaagtctcctacttgtctacagcttcgtcgctcgactattggggtcaaggaacgttggtcaccgtctctagtacggtggctgcaccatctgtcttcatcttcccgccatctgatgagcagttgaaatctggaactgcctctgttgtgtgcctgctgaataacttctatcccagagaggccaaagtacagtggaaggtggataacgccctccaatcgggtaactcccaggagagtgtcacagagcaggacagcaaggacagcacctacagcctcaagagcaccctgacgctgagcaaagcagactacgagaaacacaaagtctacgcctgcgaagtcacccatcagggcctgagctcgcccgtcacaaagagcttcaacaggggagagtgtgacaaaactcacacatgcccaccgtgcccagcacctgaactcctggggggaccgtcagtcttcctcttccccccaaaacccaaggacaccctcatgatctcccggacccctgaggtcacatgcgtggtggtggacgtgagccacgaagaccctgaggtcaagttcaactggtacgtggacggcgtggaggtgcataatgccaagacaaagccgtgtgaggagcagtacggcagcacgtaccgttgtgtcagcgtcctcaccgtcctgcaccaggactggctgaatggcaaggagtacaagtgcaaggtctccaacaaagccctcccagcccccatcgagaaaaccatctccaaagccaaagggcagccccgagaaccacaggtgtacaccctgcccccatcccgggaggagatgaccaagaaccaggtcagcctgacctgcctggtcaaaggcttctatcccagcgacatcgccgtggagtgggagagcaatgggcagccggagaacaactacaagaccacgcctcccgtgctggactccgacggctccttcttcctctatagcaagctcaccgtggacaagagcaggtggcagcaggggaacgtcttctcatgctccgtgatgcatgaggctctgcacaaccactacacgcagaagagcctctccctgtctccgggtggtggcggatcgggaggtggcggatcccaggtgcagctgcaggagtcgggcccaggactggtgaagccttcggagaccctgtccctcacctgcactgtctctggtggctccatcagtagttacttctggagctggattcggcagcccccaggtaagggactggagtggattggctatatctattacagtgggcagaccaaatacaacccctccctcaagagtcgagtcaccatatcaatagacacgtccaagaaccagttctccctgaagctgagctctgtgaccgctgcggacacggccgtgtattactgtgcgagagaaactgggagctactacggctttgactactggggcaagggaaccctggtcaccgtctcctcagcctccaccaagggcccatcggtcttccccctggcaccctcctccaagagcacctctgggggcacagcggccctgggctgcctggtcaaggactacttccccgaaccggtgacggtgtcgtggaactcaggcgccctgaccagcggcgtgcacaccttcccggctgtcctacagtcctcaggactctactccctcgagagcgtggtgaccgtgccctccagcagcttgggcacccagacctacatctgcaacgtgaatcacaagcccagcaacaccaaggtggacaagaaagttgagcccaaatcttgt

SEQ ID NO: 657 - DNA, 633 bp, synthetic construct; identical to SEQ ID NO: 651
  misc_feature 1..633: note = source = /note="Description of Artificial Sequence: Synthetic polynucleotide"
  source 1..633: mol_type = other DNA

SEQ ID NO: 658 - protein, 214 aa, synthetic construct; identical to SEQ ID NO: 587
  REGION 1..214: note = source = /note="Description of Artificial Sequence: Synthetic polypeptide"

SEQ ID NO: 659 - protein, 683 aa, synthetic construct
  REGION 1..683: note = source = /note="Description of Artificial Sequence: Synthetic polypeptide"
EVQLVESGGGLVQPGRSLRLSCAASGFTFDDYAMHWVRQAPGKKLEWVSAITWNSGHIDYADSVEGRFTISRDNAKNSLYLQMNSLRAEDTAVYYCAKVSYLSTASSLDYWGQGTLVTVSSTVAAPSVFIFPPSDEQLKSGTASVVCLLNNFYPREAKVQWKVDNALQSGNSQESVTEQDSKDSTYSLKSTLTLSKADYEKHKVYACEVTHQGLSSPVTKSFNRGECDKTHTCPPCPAPELLGGPSVFLFPPKPKDTLMISRTPEVTCVVVDVSHEDPEVKFNWYVDGVEVHNAKTKPCEEQYGSTYRCVSVLTVLHQDWLNGKEYKCKVSNKALPAPIEKTISKAKGQPREPQVYTLPPSREEMTKNQVSLTCLVKGFYPSDIAVEWESNGQPENNYKTTPPVLDSDGSFFLYSKLTVDKSRWQQGNVFSCSVMHEALHNHYTQKSLSLSPGGGGSGGGGSQVQLQESGPGLVKPSETLSLTCTVSGGSISSYFWSWIRQPPGKGLEWIGYIYYSGQTKYNPSLKSRVTISIDTSKNQFSLKLSSVTAADTAVYYCARETGSYYGFDYWGKGTLVTVSSASTKGPSVFPLAPSSKSTSGGTAALGCLVKDYFPEPVTVSWNSGALTSGVHTFPAVLQSSGLYSLESVVTVPSSSLGTQTYICNVNHKPSNTKVDKKVEPKSC

SEQ ID NO: 660 - protein, 211 aa, synthetic construct; identical to SEQ ID NO: 654
  REGION 1..211: note = source = /note="Description of Artificial Sequence: Synthetic polypeptide"

SEQ ID NO: 661 - DNA, 660 bp, synthetic construct; identical to SEQ ID NO: 590
  misc_feature 1..660: note = source = /note="Description of Artificial Sequence: Synthetic polynucleotide"
  source 1..660: mol_type = other DNA

SEQ ID NO: 662 - DNA, 2070 bp, synthetic construct
  misc_feature 1..2070: note = source = /note="Description of Artificial Sequence: Synthetic polynucleotide"
  source 1..2070: mol_type = other DNA
gaggtacaactggtggaatcaggtggaggtttggtgcagccggggagatcgctcaggcttagctgtgcggcatcggggtttactttcgatgattatgcgatgcattgggtccggcaagcgcctggaaaaaagctcgagtgggtttccgccattacgtggaatagcggacacatcgattatgcagacagtgtggagggcagattcacaatctcacgagacaatgctaagaacagcctgtaccttcagatgaactcacttcgcgcggaagataccgccgtatactactgcgccaaagtctcctacttgtctacagcttcgtcgctcgactattggggtcaaggaacgttggtcaccgtctctagtacggtggctgcaccatctgtcttcatcttcccgccatctgatgagcagttgaaatctggaactgcctctgttgtgtgcctgctgaataacttctatcccagagaggccaaagtacagtggaaggtggataacgccctccaatcgggtaactcccaggagagtgtcacagagcaggacagcaaggacagcacctacagcctcaagagcaccctgacgctgagcaaagcagactacgagaaacacaaagtctacgcctgcgaagtcacccatcagggcctgagctcgcccgtcacaaagagcttcaacaggggagagtgtgacaaaactcacacatgcccaccgtgcccagcacctgaactcctggggggaccgtcagtcttcctcttccccccaaaacccaaggacaccctcatgatctcccggacccctgaggtcacatgcgtggtggtggacgtgagccacgaagaccctgaggtcaagttcaactggtacgtggacggcgtggaggtgcataatgccaagacaaagccgtgtgaggagcagtacggcagcacgtaccgttgtgtcagcgtcctcaccgtcctgcaccaggactggctgaatggcaaggagtacaagtgcaaggtctccaacaaagccctcccagcccccatcgagaaaaccatctccaaagccaaagggcagccccgagaaccacaggtgtacaccctgcccccatcccgggaggagatgaccaagaaccaggtcagcctgacctgcctggtcaaaggcttctatcccagcgacatcgccgtggagtgggagagcaatgggcagccggagaacaactacaagaccacgcctcccgtgctggactccgacggctccttcttcctctatagcaagctcaccgtggacaagagcaggtggcagcaggggaacgtcttctcatgctccgtgatgcatgaggctctgcacaaccactacacgcagaagagcctctccctgtctccgggtggtggcggatcgggaggtggcggatcccaggtacagttgcaggagtcaggtccaggactggtgaagccctcggagaccctctcactcacctgtaccatctccggggacagtgtctctaccaacagtgttgcttggaactggattaggcagcccccagggaaaggccttgagtggataggaaggacatactacaggtccaagtggtataatgattatgcagtttctctgaaaagtcgagtaaccatcagcccagacacatccaagaaccagttctccctgaagctgagctctgtgactgccgcggacacggctgtgtattactgtgcaagagaggatggggatagctactaccgctacggtatggacgtctggggcaaagggaccacggtcaccgtctcctcagcctccaccaagggcccatcggtcttccccctggcaccctcctccaagagcacctctgggggcacagcggccctgggctgcctggtcaaggactacttccccgaaccggtgacggtgtcgtggaactcaggcgccctgaccagcggcgtgcacaccttcccggctgtcctacagtcctcaggactctactccctcgagagcgtggtgaccgtgccctccagcagcttgggcacccagacctacatctgcaacgtgaatcacaagcccagcaacaccaaggtggacaagaaagttgagcccaaatcttgt

SEQ ID NO: 663 - DNA, 633 bp, synthetic construct; identical to SEQ ID NO: 651
  misc_feature 1..633: note = source = /note="Description of Artificial Sequence: Synthetic polynucleotide"
  source 1..633: mol_type = other DNA

SEQ ID NO: 664 - protein, 220 aa, synthetic construct; identical to SEQ ID NO: 593
  REGION 1..220: note = source = /note="Description of Artificial Sequence: Synthetic polypeptide"

SEQ ID NO: 665 - protein, 690 aa, synthetic construct
  REGION 1..690: note = source = /note="Description of Artificial Sequence: Synthetic polypeptide"
EVQLVESGGGLVQPGRSLRLSCAASGFTFDDYAMHWVRQAPGKKLEWVSAITWNSGHIDYADSVEGRFTISRDNAKNSLYLQMNSLRAEDTAVYYCAKVSYLSTASSLDYWGQGTLVTVSSTVAAPSVFIFPPSDEQLKSGTASVVCLLNNFYPREAKVQWKVDNALQSGNSQESVTEQDSKDSTYSLKSTLTLSKADYEKHKVYACEVTHQGLSSPVTKSFNRGECDKTHTCPPCPAPELLGGPSVFLFPPKPKDTLMISRTPEVTCVVVDVSHEDPEVKFNWYVDGVEVHNAKTKPCEEQYGSTYRCVSVLTVLHQDWLNGKEYKCKVSNKALPAPIEKTISKAKGQPREPQVYTLPPSREEMTKNQVSLTCLVKGFYPSDIAVEWESNGQPENNYKTTPPVLDSDGSFFLYSKLTVDKSRWQQGNVFSCSVMHEALHNHYTQKSLSLSPGGGGSGGGGSQVQLQESGPGLVKPSETLSLTCTISGDSVSTNSVAWNWIRQPPGKGLEWIGRTYYRSKWYNDYAVSLKSRVTISPDTSKNQFSLKLSSVTAADTAVYYCAREDGDSYYRYGMDVWGKGTTVTVSSASTKGPSVFPLAPSSKSTSGGTAALGCLVKDYFPEPVTVSWNSGALTSGVHTFPAVLQSSGLYSLESVVTVPSSSLGTQTYICNVNHKPSNTKVDKKVEPKSC

SEQ ID NO: 666 - protein, 211 aa, synthetic construct; identical to SEQ ID NO: 654
  REGION 1..211: note = source = /note="Description of Artificial Sequence: Synthetic polypeptide"

SEQ ID NO: 667 - DNA, 642 bp, synthetic construct; identical to SEQ ID NO: 578
  misc_feature 1..642: note = source = /note="Description of Artificial Sequence: Synthetic polynucleotide"
  source 1..642: mol_type = other DNA

SEQ ID NO: 668 - DNA, 2037 bp, synthetic construct
  misc_feature 1..2037: note = source = /note="Description of Artificial Sequence: Synthetic polynucleotide"
  source 1..2037: mol_type = other DNA
gaggtgcagctggtgcagtctggagcagaggtgaaaaagcccggggagtctctgaagatctcctgtaagacttctgaatacagctttaccagctactggatcggctgggtgcgccagatgcccgggaaaaaactggagtggatggggatcatctatcttggtgactcagataccagatacagcccgtccttccaaggccaggtcaccatctcagccgacaagtccatcagtaccgcctacctgcagtggagcagcctgaaggcctcggacaccgccatgtattactgtgcgagaagtaactggggtcttgactactggggccagggaaccctggtcaccgtctctagtcagcccaaggccaaccccactgtcactctgttcccgccctcctctgaggagctccaagccaacaaggccacactagtgtgtctgatcagtgacttctacccgggagctgtgacagtggcctggaaggcagatggcagccccgtcaaggcgggagtggagaccaccaaaccctccaaacagagcaacaacaagtacgcggccaagagctacctgagcctgacgcccgagcagtggaagtcccacagaagctacagctgccaggtcacgcatgaagggagcaccgtggagaagacagtggcccctacagaatgttcagacaaaactcacacatgcccaccgtgcccagcacctgaactcctggggggaccgtcagtcttcctcttccccccaaaacccaaggacaccctcatgatctcccggacccctgaggtcacatgcgtggtggtggacgtgagccacgaagaccctgaggtcaagttcaactggtacgtggacggcgtggaggtgcataatgccaagacaaagccgtgtgaggagcagtacggcagcacgtaccgttgtgtcagcgtcctcaccgtcctgcaccaggactggctgaatggcaaggagtacaagtgcaaggtctccaacaaagccctcccagcccccatcgagaaaaccatctccaaagccaaagggcagccccgagaaccacaggtgtacaccctgcccccatcccgggaggagatgaccaagaaccaggtcagcctgacctgcctggtcaaaggcttctatcccagcgacatcgccgtggagtgggagagcaatgggcagccggagaacaactacaagaccacgcctcccgtgctggactccgacggctccttcttcctctatagcaagctcaccgtggacaagagcaggtggcagcaggggaacgtcttctcatgctccgtgatgcatgaggctctgcacaaccactacacgcagaagagcctctccctgtctccgggtggtggcggatcgggaggtggcggatcccaggtgcagttacagcagtcgggcgcaggactgttgaagccttcggagaccctgtccctcacctgcgctgtccatggtgggtccttcagtggttactactggaactggattcgccagccaccagggaaggggctagagtggattggggaaatcaatcatgctggaaacaccaactacaacccgtccctcaagagtcgagtcaccatatcattagacacgtccaagaaccagttctccctgacgctgacctctgtgaccgccgcggacacggctgtgtattactgtgcgagaggatattgtagaagtaccacctgctactttgactactggggcaagggaaccctagtcaccgtctcctcagcctccaccaagggcccatcggtcttccccctggcaccctcctccaagagcacctctgggggcacagcggccctgggctgcctggtcaaggactacttccccgaaccggtgacggtgtcgtggaactcaggcgccctgaccagcggcgtgcacaccttcccggctgtcctacagtcctcaggactctactccctcgagagcgtggtgaccgtgccctccagcagcttgggcacccagacctacatctgcaacgtgaatcacaagcccagcaacaccaaggtggacaagaaagttgagcccaaatcttgt

SEQ ID NO: 669 - DNA, 645 bp, synthetic construct
  misc_feature 1..645: note = source = /note="Description of Artificial Sequence: Synthetic polynucleotide"
  source 1..645: mol_type = other DNA
cagtctgtgctgacgcagccgccctcagtgtctggggccccagggcagagggtcaccatctcctgcactgggagcagttccaacatcggggcaggttatgatgtacactggtaccagcagtttccaggaacagcccccaaactcctcatccaaggtaacagcaatcggccctcaggggtccctgaccgattctctggctccaagtctggcacctcagcctccctggccatcactgggctccaggctgaggatgaggctgattattactgccagtcctatgacagcagcctgagtggttcggtgttcggcgaagggaccaagctgaccgtcctaggtgcctccaccaagggcccatcggtcttccccctggcaccctcctccaagagcacctctgggggcacagcggccctgggctgcctggtcaaggactacttccccgaaccggtgacggtgtcgtggaactcaggcgccctgaccagcggcgtgcacaccttcccggctgtcctacagtcctcaggactctactccctcgaaagcgtggtgaccgtgccctccagcagcttgggcacccagacctacatctgcaacgtgaatcacaagcccagcaacaccaaggtggacaagaaagttgagcccaaatcttgt

SEQ ID NO: 670 - protein, 214 aa, synthetic construct; identical to SEQ ID NO: 581
  REGION 1..214: note = source = /note="Description of Artificial Sequence: Synthetic polypeptide"

SEQ ID NO: 671 - protein, 679 aa, synthetic construct
  REGION 1..679: note = source = /note="Description of Artificial Sequence: Synthetic polypeptide"
EVQLVQSGAEVKKPGESLKISCKTSEYSFTSYWIGWVRQMPGKKLEWMGIIYLGDSDTRYSPSFQGQVTISADKSISTAYLQWSSLKASDTAMYYCARSNWGLDYWGQGTLVTVSSQPKANPTVTLFPPSSEELQANKATLVCLISDFYPGAVTVAWKADGSPVKAGVETTKPSKQSNNKYAAKSYLSLTPEQWKSHRSYSCQVTHEGSTVEKTVAPTECSDKTHTCPPCPAPELLGGPSVFLFPPKPKDTLMISRTPEVTCVVVDVSHEDPEVKFNWYVDGVEVHNAKTKPCEEQYGSTYRCVSVLTVLHQDWLNGKEYKCKVSNKALPAPIEKTISKAKGQPREPQVYTLPPSREEMTKNQVSLTCLVKGFYPSDIAVEWESNGQPENNYKTTPPVLDSDGSFFLYSKLTVDKSRWQQGNVFSCSVMHEALHNHYTQKSLSLSPGGGGSGGGGSQVQLQQSGAGLLKPSETLSLTCAVHGGSFSGYYWNWIRQPPGKGLEWIGEINHAGNTNYNPSLKSRVTISLDTSKNQFSLTLTSVTAADTAVYYCARGYCRSTTCYFDYWGKGTLVTVSSASTKGPSVFPLAPSSKSTSGGTAALGCLVKDYFPEPVTVSWNSGALTSGVHTFPAVLQSSGLYSLESVVTVPSSSLGTQTYICNVNHKPSNTKVDKKVEPKSC

SEQ ID NO: 672 - protein, 215 aa, synthetic construct
  REGION 1..215: note = source = /note="Description of Artificial Sequence: Synthetic polypeptide"
QSVLTQPPSVSGAPGQRVTISCTGSSSNIGAGYDVHWYQQFPGTAPKLLIQGNSNRPSGVPDRFSGSKSGTSASLAITGLQAEDEADYYCQSYDSSLSGSVFGEGTKLTVLGASTKGPSVFPLAPSSKSTSGGTAALGCLVKDYFPEPVTVSWNSGALTSGVHTFPAVLQSSGLYSLESVVTVPSSSLGTQTYICNVNHKPSNTKVDKKVEPKSC

SEQ ID NO: 673 - DNA, 642 bp, synthetic construct; identical to SEQ ID NO: 584
  misc_feature 1..642: note = source = /note="Description of Artificial Sequence: Synthetic polynucleotide"
  source 1..642: mol_type = other DNA

SEQ ID NO: 674 - DNA, 2031 bp, synthetic construct
  misc_feature 1..2031: note = source = /note="Description of Artificial Sequence: Synthetic polynucleotide"
  source 1..2031: mol_type = other DNA
gaggtgcagctggtgcagtctggagcagaggtgaaaaagcccggggagtctctgaagatctcctgtaagacttctgaatacagctttaccagctactggatcggctgggtgcgccagatgcccgggaaaaaactggagtggatggggatcatctatcttggtgactcagataccagatacagcccgtccttccaaggccaggtcaccatctcagccgacaagtccatcagtaccgcctacctgcagtggagcagcctgaaggcctcggacaccgccatgtattactgtgcgagaagtaactggggtcttgactactggggccagggaaccctggtcaccgtctctagtcagcccaaggccaaccccactgtcactctgttcccgccctcctctgaggagctccaagccaacaaggccacactagtgtgtctgatcagtgacttctacccgggagctgtgacagtggcctggaaggcagatggcagccccgtcaaggcgggagtggagaccaccaaaccctccaaacagagcaacaacaagtacgcggccaagagctacctgagcctgacgcccgagcagtggaagtcccacagaagctacagctgccaggtcacgcatgaagggagcaccgtggagaagacagtggcccctacagaatgttcagacaaaactcacacatgcccaccgtgcccagcacctgaactcctggggggaccgtcagtcttcctcttccccccaaaacccaaggacaccctcatgatctcccggacccctgaggtcacatgcgtggtggtggacgtgagccacgaagaccctgaggtcaagttcaactggtacgtggacggcgtggaggtgcataatgccaagacaaagccgtgtgaggagcagtacggcagcacgtaccgttgtgtcagcgtcctcaccgtcctgcaccaggactggctgaatggcaaggagtacaagtgcaaggtctccaacaaagccctcccagcccccatcgagaaaaccatctccaaagccaaagggcagccccgagaaccacaggtgtacaccctgcccccatcccgggaggagatgaccaagaaccaggtcagcctgacctgcctggtcaaaggcttctatcccagcgacatcgccgtggagtgggagagcaatgggcagccggagaacaactacaagaccacgcctcccgtgctggactccgacggctccttcttcctctatagcaagctcaccgtggacaagagcaggtggcagcaggggaacgtcttctcatgctccgtgatgcatgaggctctgcacaaccactacacgcagaagagcctctccctgtctccgggtggtggcggatcgggaggtggcggatcccaggtgcagctgcaggagtcgggcccaggactggtgaagccttcggagaccctgtccctcacctgcactgtctctggtggctccatcagtagttacttctggagctggattcggcagcccccaggtaagggactggagtggattggctatatctattacagtgggcagaccaaatacaacccctccctcaagagtcgagtcaccatatcaatagacacgtccaagaaccagttctccctgaagctgagctctgtgaccgctgcggacacggccgtgtattactgtgcgagagaaactgggagctactacggctttgactactggggcaagggaaccctggtcaccgtctcctcagcctccaccaagggcccatcggtcttccccctggcaccctcctccaagagcacctctgggggcacagcggccctgggctgcctggtcaaggactacttccccgaaccggtgacggtgtcgtggaactcaggcgccctgaccagcggcgtgcacaccttcccggctgtcctacagtcctcaggactctactccctcgagagcgtggtgaccgtgccctccagcagcttgggcacccagacctacatctgcaacgtgaatcacaagcccagcaacaccaaggtggacaagaaagttgagcccaaatcttgt

SEQ ID NO: 675 - DNA, 645 bp, synthetic construct; identical to SEQ ID NO: 669
  misc_feature 1..645: note = source = /note="Description of Artificial Sequence: Synthetic polynucleotide"
  source 1..645: mol_type = other DNA

SEQ ID NO: 676 - protein, 214 aa, synthetic construct; identical to SEQ ID NO: 587
  REGION 1..214: note = source = /note="Description of Artificial Sequence: Synthetic polypeptide"

SEQ ID NO: 677 - protein, 677 aa, synthetic construct
  REGION 1..677: note = source = /note="Description of Artificial Sequence: Synthetic polypeptide"
EVQLVQSGAEVKKPGESLKISCKTSEYSFTSYWIGWVRQMPGKKLEWMGIIYLGDSDTRYSPSFQGQVTISADKSISTAYLQWSSLKASDTAMYYCARSNWGLDYWGQGTLVTVSSQPKANPTVTLFPPSSEELQANKATLVCLISDFYPGAVTVAWKADGSPVKAGVETTKPSKQSNNKYAAKSYLSLTPEQWKSHRSYSCQVTHEGSTVEKTVAPTECSDKTHTCPPCPAPELLGGPSVFLFPPKPKDTLMISRTPEVTCVVVDVSHEDPEVKFNWYVDGVEVHNAKTKPCEEQYGSTYRCVSVLTVLHQDWLNGKEYKCKVSNKALPAPIEKTISKAKGQPREPQVYTLPPSREEMTKNQVSLTCLVKGFYPSDIAVEWESNGQPENNYKTTPPVLDSDGSFFLYSKLTVDKSRWQQGNVFSCSVMHEALHNHYTQKSLSLSPGGGGSGGGGSQVQLQESGPGLVKPSETLSLTCTVSGGSISSYFWSWIRQPPGKGLEWIGYIYYSGQTKYNPSLKSRVTISIDTSKNQFSLKLSSVTAADTAVYYCARETGSYYGFDYWGKGTLVTVSSASTKGPSVFPLAPSSKSTSGGTAALGCLVKDYFPEPVTVSWNSGALTSGVHTFPAVLQSSGLYSLESVVTVPSSSLGTQTYICNVNHKPSNTKVDKKVEPKSC

SEQ ID NO: 678 - protein, 215 aa, synthetic construct; identical to SEQ ID NO: 672
  REGION 1..215: note = source = /note="Description of Artificial Sequence: Synthetic polypeptide"

SEQ ID NO: 679 - DNA, 660 bp, synthetic construct; identical to SEQ ID NO: 590
  misc_feature 1..660: note = source = /note="Description of Artificial Sequence: Synthetic polynucleotide"
  source 1..660: mol_type = other DNA

SEQ ID NO: 680 - DNA, 2052 bp, synthetic construct
  misc_feature 1..2052: note = source = /note="Description of Artificial Sequence: Synthetic polynucleotide"
  source 1..2052: mol_type = other DNA
gaggtgcagctggtgcagtctggagcagaggtgaaaaagcccggggagtctctgaagatctcctgtaagacttctgaatacagctttaccagctactggatcggctgggtgcgccagatgcccgggaaaaaactggagtggatggggatcatctatcttggtgactcagataccagatacagcccgtccttccaaggccaggtcaccatctcagccgacaagtccatcagtaccgcctacctgcagtggagcagcctgaaggcctcggacaccgccatgtattactgtgcgagaagtaactggggtcttgactactggggccagggaaccctggtcaccgtctctagtcagcccaaggccaaccccactgtcactctgttcccgccctcctctgaggagctccaagccaacaaggccacactagtgtgtctgatcagtgacttctacccgggagctgtgacagtggcctggaaggcagatggcagccccgtcaaggcgggagtggagaccaccaaaccctccaaacagagcaacaacaagtacgcggccaagagctacctgagcctgacgcccgagcagtggaagtcccacagaagctacagctgccaggtcacgcatgaagggagcaccgtggagaagacagtggcccctacagaatgttcagacaaaactcacacatgcccaccgtgcccagcacctgaactcctggggggaccgtcagtcttcctcttccccccaaaacccaaggacaccctcatgatctcccggacccctgaggtcacatgcgtggtggtggacgtgagccacgaagaccctgaggtcaagttcaactggtacgtggacggcgtggaggtgcataatgccaagacaaagccgtgtgaggagcagtacggcagcacgtaccgttgtgtcagcgtcctcaccgtcctgcaccaggactggctgaatggcaaggagtacaagtgcaaggtctccaacaaagccctcccagcccccatcgagaaaaccatctccaaagccaaagggcagccccgagaaccacaggtgtacaccctgcccccatcccgggaggagatgaccaagaaccaggtcagcctgacctgcctggtcaaaggcttctatcccagcgacatcgccgtggagtgggagagcaatgggcagccggagaacaactacaagaccacgcctcccgtgctggactccgacggctccttcttcctctatagcaagctcaccgtggacaagagcaggtggcagcaggggaacgtcttctcatgctccgtgatgcatgaggctctgcacaaccactacacgcagaagagcctctccctgtctccgggtggtggcggatcgggaggtggcggatcccaggtacagttgcaggagtcaggtccaggactggtgaagccctcggagaccctctcactcacctgtaccatctccggggacagtgtctctaccaacagtgttgcttggaactggattaggcagcccccagggaaaggccttgagtggataggaaggacatactacaggtccaagtggtataatgattatgcagtttctctgaaaagtcgagtaaccatcagcccagacacatccaagaaccagttctccctgaagctgagctctgtgactgccgcggacacggctgtgtattactgtgcaagagaggatggggatagctactaccgctacggtatggacgtctggggcaaagggaccacggtcaccgtctcctcagcctccaccaagggcccatcggtcttccccctggcaccctcctccaagagcacctctgggggcacagcggccctgggctgcctggtcaaggactacttccccgaaccggtgacggtgtcgtggaactcaggcgccctgaccagcggcgtgcacaccttcccggctgtcctacagtcctcaggactctactccctcgagagcgtggtgaccgtgccctccagcagcttgggcacccagacctacatctgcaacgtgaatcacaagcccagcaacaccaaggtggacaagaaagttgagcccaaatcttgt

SEQ ID NO: 681 - DNA, 645 bp, synthetic construct; identical to SEQ ID NO: 669
  misc_feature 1..645: note = source = /note="Description of Artificial Sequence: Synthetic polynucleotide"
  source 1..645: mol_type = other DNA

SEQ ID NO: 682 - protein, 220 aa, synthetic construct; identical to SEQ ID NO: 593
  REGION 1..220: note = source = /note="Description of Artificial Sequence: Synthetic polypeptide"

SEQ ID NO: 683 - protein, 684 aa, synthetic construct
  REGION 1..684: note = source = /note="Description of Artificial Sequence: Synthetic polypeptide"
EVQLVQSGAEVKKPGESLKISCKTSEYSFTSYWIGWVRQMPGKKLEWMGIIYLGDSDTRYSPSFQGQVTISADKSISTAYLQWSSLKASDTAMYYCARSNWGLDYWGQGTLVTVSSQPKANPTVTLFPPSSEELQANKATLVCLISDFYPGAVTVAWKADGSPVKAGVETTKPSKQSNNKYAAKSYLSLTPEQWKSHRSYSCQVTHEGSTVEKTVAPTECSDKTHTCPPCPAPELLGGPSVFLFPPKPKDTLMISRTPEVTCVVVDVSHEDPEVKFNWYVDGVEVHNAKTKPCEEQYGSTYRCVSVLTVLHQDWLNGKEYKCKVSNKALPAPIEKTISKAKGQPREPQVYTLPPSREEMTKNQVSLTCLVKGFYPSDIAVEWESNGQPENNYKTTPPVLDSDGSFFLYSKLTVDKSRWQQGNVFSCSVMHEALHNHYTQKSLSLSPGGGGSGGGGSQVQLQESGPGLVKPSETLSLTCTISGDSVSTNSVAWNWIRQPPGKGLEWIGRTYYRSKWYNDYAVSLKSRVTISPDTSKNQFSLKLSSVTAADTAVYYCAREDGDSYYRYGMDVWGKGTTVTVSSASTKGPSVFPLAPSSKSTSGGTAALGCLVKDYFPEPVTVSWNSGALTSGVHTFPAVLQSSGLYSLESVVTVPSSSLGTQTYICNVNHKPSNTKVDKKVEPKSC

SEQ ID NO: 684 - protein, 215 aa, synthetic construct; identical to SEQ ID NO: 672
  REGION 1..215: note = source = /note="Description of Artificial Sequence: Synthetic polypeptide"

SEQ ID NO: 685 - DNA, 642 bp, synthetic construct; identical to SEQ ID NO: 614
  misc_feature 1..642: note = source = /note="Description of Artificial Sequence: Synthetic polynucleotide"
  source 1..642: mol_type = other DNA

SEQ ID NO: 686 - DNA, 2055 bp, synthetic construct
  misc_feature 1..2055: note = source = /note="Description of Artificial Sequence: Synthetic polynucleotide"
  source 1..2055: mol_type = other DNA
caggtgcagttacagcagtcgggcgcaggactgttgaagccttcggagaccctgtccctcacctgcgctgtccatggtgggtccttcagtggttactactggaactggattcgccagccaccagggaagaagctagagtggattggggaaatcaatcatgctggaaacaccaactacaacccgtccctcaagagtcgagtcaccatatcattagacacgtccaagaaccagttctccctgacgctgacctctgtgaccgccgcggacacggctgtgtattactgtgcgagaggatattgtagaagtaccacctgctactttgactactggggccagggaaccctagtcaccgtctcctcaacggtggctgcaccatctgtcttcatcttcccgccatctgatgagcagttgaaatctggaactgcctctgttgtgtgcctgctgaataacttctatcccagagaggccaaagtacagtggaaggtggataacgccctccaatcgggtaactcccaggagagtgtcacagagcaggacagcaaggacagcacctacagcctcaagagcaccctgacgctgagcaaagcagactacgagaaacacaaagtctacgcctgcgaagtcacccatcagggcctgagctcgcccgtcacaaagagcttcaacaggggagagtgtgacaaaactcacacatgcccaccgtgcccagcacctgaactcctggggggaccgtcagtcttcctcttccccccaaaacccaaggacaccctcatgatctcccggacccctgaggtcacatgcgtggtggtggacgtgagccacgaagaccctgaggtcaagttcaactggtacgtggacggcgtggaggtgcataatgccaagacaaagccgtgtgaggagcagtacggcagcacgtaccgttgtgtcagcgtcctcaccgtcctgcaccaggactggctgaatggcaaggagtacaagtgcaaggtctccaacaaagccctcccagcccccatcgagaaaaccatctccaaagccaaagggcagccccgagaaccacaggtgtacaccctgcccccatcccgggaggagatgaccaagaaccaggtcagcctgacctgcctggtcaaaggcttctatcccagcgacatcgccgtggagtgggagagcaatgggcagccggagaacaactacaagaccacgcctcccgtgctggactccgacggctccttcttcctctatagcaagctcaccgtggacaagagcaggtggcagcaggggaacgtcttctcatgctccgtgatgcatgaggctctgcacaaccactacacgcagaagagcctctccctgtctccgggtggtggcggatcgggaggtggcggatccgaggtacaactggtggaatcaggtggaggtttggtgcagccggggagatcgctcaggcttagctgtgcggcatcggggtttactttcgatgattatgcgatgcattgggtccggcaagcgcctggaaaagggctcgagtgggtttccgccattacgtggaatagcggacacatcgattatgcagacagtgtggagggcagattcacaatctcacgagacaatgctaagaacagcctgtaccttcagatgaactcacttcgcgcggaagataccgccgtatactactgcgccaaagtctcctacttgtctacagcttcgtcgctcgactattggggtaaaggaacgttggtcaccgtctctagtgcctccaccaagggcccatcggtcttccccctggcaccctcctccaagagcacctctgggggcacagcggccctgggctgcctggtcaaggactacttccccgaaccggtgacggtgtcgtggaactcaggcgccctgaccagcggcgtgcacaccttcccggctgtcctacagtcctcaggactctactccctcgagagcgtggtgaccgtgccctccagcagcttgggcacccagacctacatctgcaacgtgaatcacaagcccagcaacaccaaggtggacaagaaagttgagcccaaatcttgt

SEQ ID NO: 687 - DNA, 633 bp, synthetic construct
  misc_feature 1..633: note = source = /note="Description of Artificial Sequence: Synthetic polynucleotide"
  source 1..633: mol_type = other DNA
gaaattgtgttgacgcagtctccaggcaccctgtctttgtctccaggggaaagagccaccctctcctgcagggccagtcagagtgttagaagcagttacttagcctggtaccagcagaaacctggccaggctcccaggctcctcatctatggtgcatccagcagggccactggcatcccagacaggttcagtggcagtgggtctgggacagacttcactctcaccatcagcagactggagcctgaagattttgcagtgtattactgtcagcagtatggtagctcacctaccttcggcgaagggacacgactggagattaaacgagcctccaccaagggcccatcggtcttccccctggcaccctcctccaagagcacctctgggggcacagcggccctgggctgcctggtcaaggactacttccccgaaccggtgacggtgtcgtggaactcaggcgccctgaccagcggcgtgcacaccttcccggctgtcctacagtcctcaggactctactccctcgaaagcgtggtgaccgtgccctccagcagcttgggcacccagacctacatctgcaacgtgaatcacaagcccagcaacaccaaggtggacaagaaagttgagcccaaatcttgt

SEQ ID NO: 688 - protein, 214 aa, synthetic construct; identical to SEQ ID NO: 617
  REGION 1..214: note = source = /note="Description of Artificial Sequence: Synthetic polypeptide"

SEQ ID NO: 689 - protein, 685 aa, synthetic construct
  REGION 1..685: note = source = /note="Description of Artificial Sequence: Synthetic polypeptide"
QVQLQQSGAGLLKPSETLSLTCAVHGGSFSGYYWNWIRQPPGKKLEWIGEINHAGNTNYNPSLKSRVTISLDTSKNQFSLTLTSVTAADTAVYYCARGYCRSTTCYFDYWGQGTLVTVSSTVAAPSVFIFPPSDEQLKSGTASVVCLLNNFYPREAKVQWKVDNALQSGNSQESVTEQDSKDSTYSLKSTLTLSKADYEKHKVYACEVTHQGLSSPVTKSFNRGECDKTHTCPPCPAPELLGGPSVFLFPPKPKDTLMISRTPEVTCVVVDVSHEDPEVKFNWYVDGVEVHNAKTKPCEEQYGSTYRCVSVLTVLHQDWLNGKEYKCKVSNKALPAPIEKTISKAKGQPREPQVYTLPPSREEMTKNQVSLTCLVKGFYPSDIAVEWESNGQPENNYKTTPPVLDSDGSFFLYSKLTVDKSRWQQGNVFSCSVMHEALHNHYTQKSLSLSPGGGGSGGGGSEVQLVESGGGLVQPGRSLRLSCAASGFTFDDYAMHWVRQAPGKGLEWVSAITWNSGHIDYADSVEGRFTISRDNAKNSLYLQMNSLRAEDTAVYYCAKVSYLSTASSLDYWGKGTLVTVSSASTKGPSVFPLAPSSKSTSGGTAALGCLVKDYFPEPVTVSWNSGALTSGVHTFPAVLQSSGLYSLESVVTVPSSSLGTQTYICNVNHKPSNTKVDKKVEPKSC

SEQ ID NO: 690 - protein, 211 aa, synthetic construct
  REGION 1..211: note = source = /note="Description of Artificial Sequence: Synthetic polypeptide"
EIVLTQSPGTLSLSPGERATLSCRASQSVRSSYLAWYQQKPGQAPRLLIYGASSRATGIPDRFSGSGSGTDFTLTISRLEPEDFAVYYCQQYGSSPTFGEGTRLEIKRASTKGPSVFPLAPSSKSTSGGTAALGCLVKDYFPEPVTVSWNSGALTSGVHTFPAVLQSSGLYSLESVVTVPSSSLGTQTYICNVNHKPSNTKVDKKVEPKSC

SEQ ID NO: 691 - DNA, 651 bp, synthetic construct; identical to SEQ ID NO: 620
  misc_feature 1..651: note = source = /note="Description of Artificial Sequence: Synthetic polynucleotide"
  source 1..651: mol_type = other DNA

SEQ ID NO: 692 - DNA, 2040 bp, synthetic construct
  misc_feature 1..2040: note = source = /note="Description of Artificial Sequence: Synthetic polynucleotide"
  source 1..2040: mol_type = other DNA
caggtgcagttacagcagtcgggcgcaggactgttgaagccttcggagaccctgtccctcacctgcgctgtccatggtgggtccttcagtggttactactggaactggattcgccagccaccagggaagaagctagagtggattggggaaatcaatcatgctggaaacaccaactacaacccgtccctcaagagtcgagtcaccatatcattagacacgtccaagaaccagttctccctgacgctgacctctgtgaccgccgcggacacggctgtgtattactgtgcgagaggatattgtagaagtaccacctgctactttgactactggggccagggaaccctagtcaccgtctcctcaacggtggctgcaccatctgtcttcatcttcccgccatctgatgagcagttgaaatctggaactgcctctgttgtgtgcctgctgaataacttctatcccagagaggccaaagtacagtggaaggtggataacgccctccaatcgggtaactcccaggagagtgtcacagagcaggacagcaaggacagcacctacagcctcaagagcaccctgacgctgagcaaagcagactacgagaaacacaaagtctacgcctgcgaagtcacccatcagggcctgagctcgcccgtcacaaagagcttcaacaggggagagtgtgacaaaactcacacatgcccaccgtgcccagcacctgaactcctggggggaccgtcagtcttcctcttccccccaaaacccaaggacaccctcatgatctcccggacccctgaggtcacatgcgtggtggtggacgtgagccacgaagaccctgaggtcaagttcaactggtacgtggacggcgtggaggtgcataatgccaagacaaagccgtgtgaggagcagtacggcagcacgtaccgttgtgtcagcgtcctcaccgtcctgcaccaggactggctgaatggcaaggagtacaagtgcaaggtctccaacaaagccctcccagcccccatcgagaaaaccatctccaaagccaaagggcagccccgagaaccacaggtgtacaccctgcccccatcccgggaggagatgaccaagaaccaggtcagcctgacctgcctggtcaaaggcttctatcccagcgacatcgccgtggagtgggagagcaatgggcagccggagaacaactacaagaccacgcctcccgtgctggactccgacggctccttcttcctctatagcaagctcaccgtggacaagagcaggtggcagcaggggaacgtcttctcatgctccgtgatgcatgaggctctgcacaaccactacacgcagaagagcctctccctgtctccgggtggtggcggatcgggaggtggcggatccgaggtgcagctggtgcagtctggagcagaggtgaaaaagcccggggagtctctgaagatctcctgtaagacttctgaatacagctttaccagctactggatcggctgggtgcgccagatgcccgggaaaggcctggagtggatggggatcatctatcttggtgactcagataccagatacagcccgtccttccaaggccaggtcaccatctcagccgacaagtccatcagtaccgcctacctgcagtggagcagcctgaaggcctcggacaccgccatgtattactgtgcgagaagtaactggggtcttgactactggggcaagggaaccctggtcaccgtctctagtgcctccaccaagggcccatcggtcttccccctggcaccctcctccaagagcacctctgggggcacagcggccctgggctgcctggtcaaggactacttccccgaaccggtgacggtgtcgtggaactcaggcgccctgaccagcggcgtgcacaccttcccggctgtcctacagtcctcaggactctactccctcgagagcgtggtgaccgtgccctccagcagcttgggcacccagacctacatctgcaacgtgaatcacaagcccagcaacaccaaggtggacaagaaagttgagcccaaatcttgt

SEQ ID NO: 693 - DNA, 633 bp, synthetic construct; identical to SEQ ID NO: 687
  misc_feature 1..633: note = source = /note="Description of Artificial Sequence: Synthetic polynucleotide"
  source 1..633: mol_type = other DNA

SEQ ID NO: 694 - protein, 217 aa, synthetic construct; identical to SEQ ID NO: 623
  REGION 1..217: note = source = /note="Description of Artificial Sequence: Synthetic polypeptide"

SEQ ID NO: 695 - protein, 680 aa, synthetic construct
  REGION 1..680: note = source = /note="Description of Artificial Sequence: Synthetic polypeptide"
QVQLQQSGAGLLKPSETLSLTCAVHGGSFSGYYWNWIRQPPGKKLEWIGEINHAGNTNYNPSLKSRVTISLDTSKNQFSLTLTSVTAADTAVYYCARGYCRSTTCYFDYWGQGTLVTVSSTVAAPSVFIFPPSDEQLKSGTASVVCLLNNFYPREAKVQWKVDNALQSGNSQESVTEQDSKDSTYSLKSTLTLSKADYEKHKVYACEVTHQGLSSPVTKSFNRGECDKTHTCPPCPAPELLGGPSVFLFPPKPKDTLMISRTPEVTCVVVDVSHEDPEVKFNWYVDGVEVHNAKTKPCEEQYGSTYRCVSVLTVLHQDWLNGKEYKCKVSNKALPAPIEKTISKAKGQPREPQVYTLPPSREEMTKNQVSLTCLVKGFYPSDIAVEWESNGQPENNYKTTPPVLDSDGSFFLYSKLTVDKSRWQQGNVFSCSVMHEALHNHYTQKSLSLSPGGGGSGGGGSEVQLVQSGAEVKKPGESLKISCKTSEYSFTSYWIGWVRQMPGKGLEWMGIIYLGDSDTRYSPSFQGQVTISADKSISTAYLQWSSLKASDTAMYYCARSNWGLDYWGKGTLVTVSSASTKGPSVFPLAPSSKSTSGGTAALGCLVKDYFPEPVTVSWNSGALTSGVHTFPAVLQSSGLYSLESVVTVPSSSLGTQTYICNVNHKPSNTKVDKKVEPKSC

SEQ ID NO: 696 - protein, 211 aa, synthetic construct; identical to SEQ ID NO: 690
  REGION 1..211: note = source = /note="Description of Artificial Sequence: Synthetic polypeptide"

SEQ ID NO: 697 - DNA, 642 bp, synthetic construct; identical to SEQ ID NO: 614
  misc_feature 1..642: note = source = /note="Description of Artificial Sequence: Synthetic polynucleotide"
  source 1..642: mol_type = other DNA

SEQ ID NO: 698 - DNA, 2049 bp, synthetic construct
  misc_feature 1..2049: note = source = /note="Description of Artificial Sequence: Synthetic polynucleotide"
  source 1..2049: mol_type = other DNA
caggtgcagctgcaggagtcgggcccaggactggtgaagccttcggagaccctgtccctcacctgcactgtctctggtggctccatcagtagttacttctggagctggattcggcagcccccaggtaagaaactggagtggattggctatatctattacagtgggcagaccaaatacaacccctccctcaagagtcgagtcaccatatcaatagacacgtccaagaaccagttctccctgaagctgagctctgtgaccgctgcggacacggccgtgtattactgtgcgagagaaactgggagctactacggctttgactactggggccagggaaccctggtcaccgtctcctcaacggtggctgcaccatctgtcttcatcttcccgccatctgatgagcagttgaaatctggaactgcctctgttgtgtgcctgctgaataacttctatcccagagaggccaaagtacagtggaaggtggataacgccctccaatcgggtaactcccaggagagtgtcacagagcaggacagcaaggacagcacctacagcctcaagagcaccctgacgctgagcaaagcagactacgagaaacacaaagtctacgcctgcgaagtcacccatcagggcctgagctcgcccgtcacaaagagcttcaacaggggagagtgtgacaaaactcacacatgcccaccgtgcccagcacctgaactcctggggggaccgtcagtcttcctcttccccccaaaacccaaggacaccctcatgatctcccggacccctgaggtcacatgcgtggtggtggacgtgagccacgaagaccctgaggtcaagttcaactggtacgtggacggcgtggaggtgcataatgccaagacaaagccgtgtgaggagcagtacggcagcacgtaccgttgtgtcagcgtcctcaccgtcctgcaccaggactggctgaatggcaaggagtacaagtgcaaggtctccaacaaagccctcccagcccccatcgagaaaaccatctccaaagccaaagggcagccccgagaaccacaggtgtacaccctgcccccatcccgggaggagatgaccaagaaccaggtcagcctgacctgcctggtcaaaggcttctatcccagcgacatcgccgtggagtgggagagcaatgggcagccggagaacaactacaagaccacgcctcccgtgctggactccgacggctccttcttcctctatagcaagctcaccgtggacaagagcaggtggcagcaggggaacgtcttctcatgctccgtgatgcatgaggctctgcacaaccactacacgcagaagagcctctccctgtctccgggtggtggcggatcgggaggtggcggatccgaggtacaactggtggaatcaggtggaggtttggtgcagccggggagatcgctcaggcttagctgtgcggcatcggggtttactttcgatgattatgcgatgcattgggtccggcaagcgcctggaaaagggctcgagtgggtttccgccattacgtggaatagcggacacatcgattatgcagacagtgtggagggcagattcacaatctcacgagacaatgctaagaacagcctgtaccttcagatgaactcacttcgcgcggaagataccgccgtatactactgcgccaaagtctcctacttgtctacagcttcgtcgctcgactattggggtaaaggaacgttggtcaccgtctctagtgcctccaccaagggcccatcggtcttccccctggcaccctcctccaagagcacctctgggggcacagcggccctgggctgcctggtcaaggactacttccccgaaccggtgacggtgtcgtggaactcaggcgccctgaccagcggcgtgcacaccttcccggctgtcctacagtcctcaggactctactccctcgagagcgtggtgaccgtgccctccagcagcttgggcacccagacctacatctgcaacgtgaatcacaagcccagcaacaccaaggtggacaagaaagttgagcccaaatcttgt

SEQ ID NO: 699 - DNA, 633 bp, synthetic construct
  misc_feature 1..633: note = source = /note="Description of Artificial Sequence: Synthetic polynucleotide"
  source 1..633: mol_type = other DNA
gacatccagatgacccagtctccatcctccctgtctgcatctgtaggagacagagtcaccatcacttgccgggcaagtcagagcattaacaactatttaaattggtatcagcagagaccagggaaagcccctaagctcctgatctatgctgcatccagtttgcaaagtggggtcccatcaaggttcagtggcagtggatctgggacagatttcactctcaccatcagcagtctgcaacctgaagattttgcaacttactactgtcaacagagttacagtacccctcggacgttcggcgaagggaccaagctggaaatcaaacgagcctccaccaagggcccatcggtcttccccctggcaccctcctccaagagcacctctgggggcacagcggccctgggctgcctggtcaaggactacttccccgaaccggtgacggtgtcgtggaactcaggcgccctgaccagcggcgtgcacaccttcccggctgtcctacagtcctcaggactctactccctcgaaagcgtggtgaccgtgccctccagcagcttgggcacccagacctacatctgcaacgtgaatcacaagcccagcaacaccaaggtggacaagaaagttgagcccaaatcttgt

SEQ ID NO: 700 - protein, 214 aa, synthetic construct; identical to SEQ ID NO: 617
  REGION 1..214: note = source = /note="Description of Artificial Sequence: Synthetic polypeptide"

SEQ ID NO: 701 - protein, 683 aa, synthetic construct
  REGION 1..683: note = source = /note="Description of Artificial Sequence: Synthetic polypeptide"
QVQLQESGPGLVKPSETLSLTCTVSGGSISSYFWSWIRQPPGKKLEWIGYIYYSGQTKYNPSLKSRVTISIDTSKNQFSLKLSSVTAADTAVYYCARETGSYYGFDYWGQGTLVTVSSTVAAPSVFIFPPSDEQLKSGTASVVCLLNNFYPREAKVQWKVDNALQSGNSQESVTEQDSKDSTYSLKSTLTLSKADYEKHKVYACEVTHQGLSSPVTKSFNRGECDKTHTCPPCPAPELLGGPSVFLFPPKPKDTLMISRTPEVTCVVVDVSHEDPEVKFNWYVDGVEVHNAKTKPCEEQYGSTYRCVSVLTVLHQDWLNGKEYKCKVSNKALPAPIEKTISKAKGQPREPQVYTLPPSREEMTKNQVSLTCLVKGFYPSDIAVEWESNGQPENNYKTTPPVLDSDGSFFLYSKLTVDKSRWQQGNVFSCSVMHEALHNHYTQKSLSLSPGGGGSGGGGSEVQLVESGGGLVQPGRSLRLSCAASGFTFDDYAMHWVRQAPGKGLEWVSAITWNSGHIDYADSVEGRFTISRDNAKNSLYLQMNSLRAEDTAVYYCAKVSYLSTASSLDYWGKGTLVTVSSASTKGPSVFPLAPSSKSTSGGTAALGCLVKDYFPEPVTVSWNSGALTSGVHTFPAVLQSSGLYSLESVVTVPSSSLGTQTYICNVNHKPSNTKVDKKVEPKSC

SEQ ID NO: 702 - protein, 211 aa, synthetic construct
  REGION 1..211: note = source = /note="Description of Artificial Sequence: Synthetic polypeptide"
DIQMTQSPSSLSASVGDRVTITCRASQSINNYLNWYQQRPGKAPKLLIYAASSLQSGVPSRFSGSGSGTDFTLTISSLQPEDFATYYCQQSYSTPRTFGEGTKLEIKRASTKGPSVFPLAPSSKSTSGGTAALGCLVKDYFPEPVTVSWNSGALTSGVHTFPAVLQSSGLYSLESVVTVPSSSLGTQTYICNVNHKPSNTKVDKKVEPKSC

SEQ ID NO: 703 - DNA, 651 bp, synthetic construct; identical to SEQ ID NO: 620
  misc_feature 1..651: note = source = /note="Description of Artificial Sequence: Synthetic polynucleotide"
  source 1..651: mol_type = other DNA

SEQ ID NO: 704 - DNA, 2034 bp, synthetic construct
  misc_feature 1..2034: note = source = /note="Description of Artificial Sequence: Synthetic polynucleotide"
  source 1..2034: mol_type = other DNA
caggtgcagctgcaggagtcgggcccaggactggtgaagccttcggagaccctgtccctcacctgcactgtctctggtggctccatcagtagttacttctggagctggattcggcagcccccaggtaagaaactggagtggattggctatatctattacagtgggcagaccaaatacaacccctccctcaagagtcgagtcaccatatcaatagacacgtccaagaaccagttctccctgaagctgagctctgtgaccgctgcggacacggccgtgtattactgtgcgagagaaactgggagctactacggctttgactactggggccagggaaccctggtcaccgtctcctcaacggtggctgcaccatctgtcttcatcttcccgccatctgatgagcagttgaaatctggaactgcctctgttgtgtgcctgctgaataacttctatcccagagaggccaaagtacagtggaaggtggataacgccctccaatcgggtaactcccaggagagtgtcacagagcaggacagcaaggacagcacctacagcctcaagagcaccctgacgctgagcaaagcagactacgagaaacacaaagtctacgcctgcgaagtcacccatcagggcctgagctcgcccgtcacaaagagcttcaacaggggagagtgtgacaaaactcacacatgcccaccgtgcccagcacctgaactcctggggggaccgtcagtcttcctcttccccccaaaacccaaggacaccctcatgatctcccggacccctgaggtcacatgcgtggtggtggacgtgagccacgaagaccctgaggtcaagttcaactggtacgtggacggcgtggaggtgcataatgccaagacaaagccgtgtgaggagcagtacggcagcacgtaccgttgtgtcagcgtcctcaccgtcctgcaccaggactggctgaatggcaaggagtacaagtgcaaggtctccaacaaagccctcccagcccccatcgagaaaaccatctccaaagccaaagggcagccccgagaaccacaggtgtacaccctgcccccatcccgggaggagatgaccaagaaccaggtcagcctgacctgcctggtcaaaggcttctatcccagcgacatcgccgtggagtgggagagcaatgggcagccggagaacaactacaagaccacgcctcccgtgctggactccgacggctccttcttcctctatagcaagctcaccgtggacaagagcaggtggcagcaggggaacgtcttctcatgctccgtgatgcatgaggctctgcacaaccactacacgcagaagagcctctccctgtctccgggtggtggcggatcgggaggtggcggatccgaggtgcagctggtgcagtctggagcagaggtgaaaaagcccggggagtctctgaagatctcctgtaagacttctgaatacagctttaccagctactggatcggctgggtgcgccagatgcccgggaaaggcctggagtggatggggatcatctatcttggtgactcagataccagatacagcccgtccttccaaggccaggtcaccatctcagccgacaagtccatcagtaccgcctacctgcagtggagcagcctgaaggcctcggacaccgccatgtattactgtgcgagaagtaactggggtcttgactactggggcaagggaaccctggtcaccgtctctagtgcctccaccaagggcccatcggtcttccccctggcaccctcctccaagagcacctctgggggcacagcggccctgggctgcctggtcaaggactacttccccgaaccggtgacggtgtcgtggaactcaggcgccctgaccagcggcgtgcacaccttcccggctgtcctacagtcctcaggactctactccctcgagagcgtggtgaccgtgccctccagcagcttgggcacccagacctacatctgcaacgtgaatcacaagcccagcaacaccaaggtggacaagaaagttgagcccaaatcttgt

SEQ ID NO: 705 - DNA, 633 bp, synthetic construct; identical to SEQ ID NO: 699
  misc_feature 1..633: note = source = /note="Description of Artificial Sequence: Synthetic polynucleotide"
  source 1..633: mol_type = other DNA

SEQ ID NO: 706 - protein, 217 aa, synthetic construct; identical to SEQ ID NO: 623
  REGION 1..217: note = source = /note="Description of Artificial Sequence: Synthetic polypeptide"

SEQ ID NO: 707 - protein, 678 aa, synthetic construct
  REGION 1..678: note = source = /note="Description of Artificial Sequence: Synthetic polypeptide"
QVQLQESGPGLVKPSETLSLTCTVSGGSISSYFWSWIRQPPGKKLEWIGYIYYSGQTKYNPSLKSRVTISIDTSKNQFSLKLSSVTAADTAVYYCARETGSYYGFDYWGQGTLVTVSSTVAAPSVFIFPPSDEQLKSGTASVVCLLNNFYPREAKVQWKVDNALQSGNSQESVTEQDSKDSTYSLKSTLTLSKADYEKHKVYACEVTHQGLSSPVTKSFNRGECDKTHTCPPCPAPELLGGPSVFLFPPKPKDTLMISRTPEVTCVVVDVSHEDPEVKFNWYVDGVEVHNAKTKPCEEQYGSTYRCVSVLTVLHQDWLNGKEYKCKVSNKALPAPIEKTISKAKGQPREPQVYTLPPSREEMTKNQVSLTCLVKGFYPSDIAVEWESNGQPENNYKTTPPVLDSDGSFFLYSKLTVDKSRWQQGNVFSCSVMHEALHNHYTQKSLSLSPGGGGSGGGGSEVQLVQSGAEVKKPGESLKISCKTSEYSFTSYWIGWVRQMPGKGLEWMGIIYLGDSDTRYSPSFQGQVTISADKSISTAYLQWSSLKASDTAMYYCARSNWGLDYWGKGTLVTVSSASTKGPSVFPLAPSSKSTSGGTAALGCLVKDYFPEPVTVSWNSGALTSGVHTFPAVLQSSGLYSLESVVTVPSSSLGTQTYICNVNHKPSNTKVDKKVEPKSC

SEQ ID NO: 708 - protein, 211 aa, synthetic construct; identical to SEQ ID NO: 702
  REGION 1..211: note = source = /note="Description of Artificial Sequence: Synthetic polypeptide"

SEQ ID NO: 709 - DNA, 642 bp, synthetic construct; identical to SEQ ID NO: 614
  misc_feature 1..642: note = source = /note="Description of Artificial Sequence: Synthetic polynucleotide"
  source 1..642: mol_type = other DNA

SEQ ID NO: 710 - DNA, 2070 bp, synthetic construct
  misc_feature 1..2070: note = source = /note="Description of Artificial Sequence: Synthetic polynucleotide"
  source 1..2070: mol_type = other DNA
caggtacagttgcaggagtcaggtccaggactggtgaagccctcggagaccctctcactcacctgtaccatctccggggacagtgtctctaccaacagtgttgcttggaactggattaggcagcccccagggaaaaaacttgagtggataggaaggacatactacaggtccaagtggtataatgattatgcagtttctctgaaaagtcgagtaaccatcagcccagacacatccaagaaccagttctccctgaagctgagctctgtgactgccgcggacacggctgtgtattactgtgcaagagaggatggggatagctactaccgctacggtatggacgtctggggccaagggaccacggtcaccgtctcctcaacggtggctgcaccatctgtcttcatcttcccgccatctgatgagcagttgaaatctggaactgcctctgttgtgtgcctgctgaataacttctatcccagagaggccaaagtacagtggaaggtggataacgccctccaatcgggtaactcccaggagagtgtcacagagcaggacagcaaggacagcacctacagcctcaagagcaccctgacgctgagcaaagcagactacgagaaacacaaagtctacgcctgcgaagtcacccatcagggcctgagctcgcccgtcacaaagagcttcaacaggggagagtgtgacaaaactcacacatgcccaccgtgcccagcacctgaactcctggggggaccgtcagtcttcctcttccccccaaaacccaaggacaccctcatgatctcccggacccctgaggtcacatgcgtggtggtggacgtgagccacgaagaccctgaggtcaagttcaactggtacgtggacggcgtggaggtgcataatgccaagacaaagccgtgtgaggagcagtacggcagcacgtaccgttgtgtcagcgtcctcaccgtcctgcaccaggactggctgaatggcaaggagtacaagtgcaaggtctccaacaaagccctcccagcccccatcgagaaaaccatctccaaagccaaagggcagccccgagaaccacaggtgtacaccctgcccccatcccgggaggagatgaccaagaaccaggtcagcctgacctgcctggtcaaaggcttctatcccagcgacatcgccgtggagtgggagagcaatgggcagccggagaacaactacaagaccacgcctcccgtgctggactccgacggctccttcttcctctatagcaagctcaccgtggacaagagcaggtggcagcaggggaacgtcttctcatgctccgtgatgcatgaggctctgcacaaccactacacgcagaagagcctctccctgtctccgggtggtggcggatcgggaggtggcggatccgaggtacaactggtggaatcaggtggaggtttggtgcagccggggagatcgctcaggcttagctgtgcggcatcggggtttactttcgatgattatgcgatgcattgggtccggcaagcgcctggaaaagggctcgagtgggtttccgccattacgtggaatagcggacacatcgattatgcagacagtgtggagggcagattcacaatctcacgagacaatgctaagaacagcctgtaccttcagatgaactcacttcgcgcggaagataccgccgtatactactgcgccaaagtctcctacttgtctacagcttcgtcgctcgactattggggtaaaggaacgttggtcaccgtctctagtgcctccaccaagggcccatcggtcttccccctggcaccctcctccaagagcacctctgggggcacagcggccctgggctgcctggtcaaggactacttccccgaaccggtgacggtgtcgtggaactcaggcgccctgaccagcggcgtgcacaccttcccggctgtcctacagtcctcaggactctactccctcgagagcgtggtgaccgtgccctccagcagcttgggcacccagacctacatctgcaacgtgaatcacaagcccagcaacaccaaggtggacaagaaagttgagcccaaatcttgt

SEQ ID NO: 711 - DNA, 651 bp, synthetic construct
  misc_feature 1..651: note = source = /note="Description of Artificial Sequence: Synthetic polynucleotide"
  source 1..651: mol_type = other DNA
gacatccagatgacccagtctccaagctccctgtctgcgtctgtgggcgatagggtcaccatcacttgcaggtccagccagagtgtgttatacagctccaacaataagaactacttagtttggtaccagcagaaaccaggaaaggttcctaaactgctcatttactgggcatctacccgggaatccggggtccctagtcgattcagtggcagcgggtctgggacagatttcactctcaccatcagcagcctgcagcctgaagatgtggcaacttattactgtcagcaatattataagactcctctcactttcggcgaagggaccaaggtggagatcaaacgagcctccaccaagggcccatcggtcttccccctggcaccctcctccaagagcacctctgggggcacagcggccctgggctgcctggtcaaggactacttccccgaaccggtgacggtgtcgtggaactcaggcgccctgaccagcggcgtgcacaccttcccggctgtcctacagtcctcaggactctactccctcgaaagcgtggtgaccgtgccctccagcagcttgggcacccagacctacatctgcaacgtgaatcacaagcccagcaacaccaaggtggacaagaaagttgagcccaaatcttgt

SEQ ID NO: 712 - protein, 214 aa, synthetic construct; identical to SEQ ID NO: 617
  REGION 1..214: note = source = /note="Description of Artificial Sequence: Synthetic polypeptide"

SEQ ID NO: 713 - protein, 690 aa, synthetic construct
  REGION 1..690: note = source = /note="Description of Artificial Sequence: Synthetic polypeptide"
QVQLQESGPGLVKPSETLSLTCTISGDSVSTNSVAWNWIRQPPGKKLEWIGRTYYRSKWYNDYAVSLKSRVTISPDTSKNQFSLKLSSVTAADTAVYYCAREDGDSYYRYGMDVWGQGTTVTVSSTVAAPSVFIFPPSDEQLKSGTASVVCLLNNFYPREAKVQWKVDNALQSGNSQESVTEQDSKDSTYSLKSTLTLSKADYEKHKVYACEVTHQGLSSPVTKSFNRGECDKTHTCPPCPAPELLGGPSVFLFPPKPKDTLMISRTPEVTCVVVDVSHEDPEVKFNWYVDGVEVHNAKTKPCEEQYGSTYRCVSVLTVLHQDWLNGKEYKCKVSNKALPAPIEKTISKAKGQPREPQVYTLPPSREEMTKNQVSLTCLVKGFYPSDIAVEWESNGQPENNYKTTPPVLDSDGSFFLYSKLTVDKSRWQQGNVFSCSVMHEALHNHYTQKSLSLSPGGGGSGGGGSEVQLVESGGGLVQPGRSLRLSCAASGFTFDDYAMHWVRQAPGKGLEWVSAITWNSGHIDYADSVEGRFTISRDNAKNSLYLQMNSLRAEDTAVYYCAKVSYLSTASSLDYWGKGTLVTVSSASTKGPSVFPLAPSSKSTSGGTAALGCLVKDYFPEPVTVSWNSGALTSGVHTFPAVLQSSGLYSLESVVTVPSSSLGTQTYICNVNHKPSNTKVDKKVEPKSC

SEQ ID NO: 714 - protein, 217 aa, synthetic construct
  REGION 1..217: note = source = /note="Description of Artificial Sequence: Synthetic polypeptide"
DIQMTQSPSSLSASVGDRVTITCRSSQSVLYSSNNKNYLVWYQQKPGKVPKLLIYWASTRESGVPSRFSGSGSGTDFTLTISSLQPEDVATYYCQQYYKTPLTFGEGTKVEIKRASTKGPSVFPLAPSSKSTSGGTAALGCLVKDYFPEPVTVSWNSGALTSGVHTFPAVLQSSGLYSLESVVTVPSSSLGTQTYICNVNHKPSNTKVDKKVEPKSC

SEQ ID NO: 715 - DNA, 651 bp, synthetic construct; identical to SEQ ID NO: 620
  misc_feature 1..651: note = source = /note="Description of Artificial Sequence: Synthetic polynucleotide"
  source 1..651: mol_type = other DNA

SEQ ID NO: 716 - DNA, 2055 bp, synthetic construct
  misc_feature 1..2055: note = source = /note="Description of Artificial Sequence: Synthetic polynucleotide"
  source 1..2055: mol_type = other DNA
caggtacagttgcaggagtcaggtccaggactggtgaagccctcggagaccctctcactcacctgtaccatctccggggacagtgtctctaccaacagtgttgcttggaactggattaggcagcccccagggaaaaaacttgagtggataggaaggacatactacaggtccaagtggtataatgattatgcagtttctctgaaaagtcgagtaaccatcagcccagacacatccaagaaccagttctccctgaagctgagctctgtgactgccgcggacacggctgtgtattactgtgcaagagaggatggggatagctactaccgctacggtatggacgtctggggccaagggaccacggtcaccgtctcctcaacggtggctgcaccatctgtcttcatcttcccgccatctgatgagcagttgaaatctggaactgcctctgttgtgtgcctgctgaataacttctatcccagagaggccaaagtacagtggaaggtggataacgccctccaatcgggtaactcccaggagagtgtcacagagcaggacagcaaggacagcacctacagcctcaagagcaccctgacgctgagcaaagcagactacgagaaacacaaagtctacgcctgcgaagtcacccatcagggcctgagctcgcccgtcacaaagagcttcaacaggggagagtgtgacaaaactcacacatgcccaccgtgcccagcacctgaactcctggggggaccgtcagtcttcctcttccccccaaaacccaaggacaccctcatgatctcccggacccctgaggtcacatgcgtggtggtggacgtgagccacgaagaccctgaggtcaagttcaactggtacgtggacggcgtggaggtgcataatgccaagacaaagccgtgtgaggagcagtacggcagcacgtaccgttgtgtcagcgtcctcaccgtcctgcaccaggactggctgaatggcaaggagtacaagtgcaaggtctccaacaaagccctcccagcccccatcgagaaaaccatctccaaagccaaagggcagccccgagaaccacaggtgtacaccctgcccccatcccgggaggagatgaccaagaaccaggtcagcctgacctgcctggtcaaaggcttctatcccagcgacatcgccgtggagtgggagagcaatgggcagccggagaacaactacaagaccacgcctcccgtgctggactccgacggctccttcttcctctatagcaagctcaccgtggacaagagcaggtggcagcaggggaacgtcttctcatgctccgtgatgcatgaggctctgcacaaccactacacgcagaagagcctctccctgtctccgggtggtggcggatcgggaggtggcggatccgaggtgcagctggtgcagtctggagcagaggtgaaaaagcccggggagtctctgaagatctcctgtaagacttctgaatacagctttaccagctactggatcggctgggtgcgccagatgcccgggaaaggcctggagtggatggggatcatctatcttggtgactcagataccagatacagcccgtccttccaaggccaggtcaccatctcagccgacaagtccatcagtaccgcctacctgcagtggagcagcctgaaggcctcggacaccgccatgtattactgtgcgagaagtaactggggtcttgactactggggcaagggaaccctggtcaccgtctctagtgcctccaccaagggcccatcggtcttccccctggcaccctcctccaagagcacctctgggggcacagcggccctgggctgcctggtcaaggactacttccccgaaccggtgacggtgtcgtggaactcaggcgccctgaccagcggcgtgcacaccttcccggctgtcctacagtcctcaggactctactccctcgagagcgtggtgaccgtgccctccagcagcttgggcacccagacctacatctgcaacgtgaatcacaagcccagcaacaccaaggtggacaagaaagttgagcccaaatcttgt

SEQ ID NO: 717 - DNA, 651 bp, synthetic construct; identical to SEQ ID NO: 711
  misc_feature 1..651: note = source = /note="Description of Artificial Sequence: Synthetic polynucleotide"
  source 1..651: mol_type = other DNA

SEQ ID NO: 718 - protein, 217 aa, synthetic construct; identical to SEQ ID NO: 623
  REGION 1..217: note = source = /note="Description of Artificial Sequence: Synthetic polypeptide"

SEQ ID NO: 719 - protein, 685 aa, synthetic construct
  REGION 1..685: note = source = /note="Description of Artificial Sequence: Synthetic polypeptide"
QVQLQESGPGLVKPSETLSLTCTISGDSVSTNSVAWNWIRQPPGKKLEWIGRTYYRSKWYNDYAVSLKSRVTISPDTSKNQFSLKLSSVTAADTAVYYCAREDGDSYYRYGMDVWGQGTTVTVSSTVAAPSVFIFPPSDEQLKSGTASVVCLLNNFYPREAKVQWKVDNALQSGNSQESVTEQDSKDSTYSLKSTLTLSKADYEKHKVYACEVTHQGLSSPVTKSFNRGECDKTHTCPPCPAPELLGGPSVFLFPPKPKDTLMISRTPEVTCVVVDVSHEDPEVKFNWYVDGVEVHNAKTKPCEEQYGSTYRCVSVLTVLHQDWLNGKEYKCKVSNKALPAPIEKTISKAKGQPREPQVYTLPPSREEMTKNQVSLTCLVKGFYPSDIAVEWESNGQPENNYKTTPPVLDSDGSFFLYSKLTVDKSRWQQGNVFSCSVMHEALHNHYTQKSLSLSPGGGGSGGGGSEVQLVQSGAEVKKPGESLKISCKTSEYSFTSYWIGWVRQMPGKGLEWMGIIYLGDSDTRYSPSFQGQVTISADKSISTAYLQWSSLKASDTAMYYCARSNWGLDYWGKGTLVTVSSASTKGPSVFPLAPSSKSTSGGTAALGCLVKDYFPEPVTVSWNSGALTSGVHTFPAVLQSSGLYSLESVVTVPSSSLGTQTYICNVNHKPSNTKVDKKVEPKSC

SEQ ID NO: 720 - protein, 217 aa, synthetic construct; identical to SEQ ID NO: 714
  REGION 1..217: note = source = /note="Description of Artificial Sequence: Synthetic polypeptide"

SEQ ID NO: 721 - DNA, 642 bp, synthetic construct; identical to SEQ ID NO: 577
  misc_feature 1..642: note = source = /note="Description of Artificial Sequence: Synthetic polynucleotide"
  source 1..642: mol_type = other DNA

SEQ ID NO: 722 - DNA, 2055 bp, synthetic construct
  misc_feature 1..2055: note = source = /note="Description of Artificial Sequence: Synthetic polynucleotide"
  source 1..2055: mol_type = other DNA
gaggtacaactggtggaatcaggtggaggtttggtgcagccggggagatcgctcaggcttagctgtgcggcatcggggtttactttcgatgattatgcgatgcattgggtccggcaagcgcctggaaaaaagctcgagtgggtttccgccattacgtggaatagcggacacatcgattatgcagacagtgtggagggcagattcacaatctcacgagacaatgctaagaacagcctgtaccttcagatgaactcacttcgcgcggaagataccgccgtatactactgcgccaaagtctcctacttgtctacagcttcgtcgctcgactattggggtcaaggaacgttggtcaccgtctctagtgcctccaccaagggcccatcggtcttccccctggcaccctcctccaagagcacctctgggggcacagcggccctgggctgcctggtcaaggactacttccccgaaccggtgacggtgtcgtggaactcaggcgccctgaccagcggcgtgcacaccttcccggctgtcctacagtcctcaggactctactccctcaaaagcgtggtgaccgtgccctccagcagcttgggcacccagacctacatctgcaacgtgaatcacaagcccagcaacaccaaggtggacaagaaagttgagcccaaatcttgtgacaaaactcacacatgcccaccgtgcccagcacctgaactcctggggggaccgtcagtcttcctcttccccccaaaacccaaggacaccctcatgatctcccggacccctgaggtcacatgcgtggtggtggacgtgagccacgaagaccctgaggtcaagttcaactggtacgtggacggcgtggaggtgcataatgccaagacaaagccgtgtgaggagcagtacggcagcacgtaccgttgtgtcagcgtcctcaccgtcctgcaccaggactggctgaatggcaaggagtacaagtgcaaggtctccaacaaagccctcccagcccccatcgagaaaaccatctccaaagccaaagggcagccccgagaaccacaggtgtacaccctgcccccatcccgggaggagatgaccaagaaccaggtcagcctgacctgcctggtcaaaggcttctatcccagcgacatcgccgtggagtgggagagcaatgggcagccggagaacaactacaagaccacgcctcccgtgctggactccgacggctccttcttcctctatagcaagctcaccgtggacaagagcaggtggcagcaggggaacgtcttctcatgctccgtgatgcatgaggctctgcacaaccactacacgcagaagagcctctccctgtctccgggtggtggcggatcgggaggtggcggatcccaggtgcagttacagcagtcgggcgcaggactgttgaagccttcggagaccctgtccctcacctgcgctgtccatggtgggtccttcagtggttactactggaactggattcgccagccaccagggaaggggctagagtggattggggaaatcaatcatgctggaaacaccaactacaacccgtccctcaagagtcgagtcaccatatcattagacacgtccaagaaccagttctccctgacgctgacctctgtgaccgccgcggacacggctgtgtattactgtgcgagaggatattgtagaagtaccacctgctactttgactactggggcaagggaaccctagtcaccgtctcctcaactgtggctgcaccatctgtcttcatcttcccgccatctgatgagcagttgaaatctggaactgcctctgttgtgtgcctgctgaataacttctatcccagagaggccaaagtacagtggaaggtggataacgccctccaatcgggtaactcccaggagagtgtcacagagcaggacagcaaggacagcacctacagcctcgaaagcaccctgacgctgagcaaagcagactacgagaaacacaaagtctacgcctgcgaagtcacccatcagggcctgagctcgcccgtcacaaagagcttcaacaggggagagtgt

SEQ ID NO: 723 - DNA, 633 bp, synthetic construct
  misc_feature 1..633: note = source = /note="Description of Artificial Sequence: Synthetic polynucleotide"
  source 1..633: mol_type = other DNA
gaaattgtgttgacgcagtctccaggcaccctgtctttgtctccaggggaaagagccaccctctcctgcagggccagtcagagtgttagaagcagttacttagcctggtaccagcagaaacctggccaggaacccaggctcctcatctatggtgcatccagcagggccactggcatcccagacaggttcagtggcagtgggtctgggacagacttcactctcaccatcagcagactggagcctgaagattttgcagtgtattactgtcagcagtatggtagctcacctaccttcggccaagggacacgactggagattaaacgagcctccaccaagggcccatcggtcttccccctggcaccctcctccaagagcacctctgggggcacagcggccctgggctgcctggtcaaggactacttccccgaaccggtgacggtgtcgtggaactcaggcgccctgaccagcggcgtgcacaccttcccggctgtcctacagtcctcaggactctactccctcaaaagcgtggtgaccgtgccctccagcagcttgggcacccagacctacatctgcaacgtgaatcacaagcccagcaacaccaaggtggacaagaaagttgagcccaaatcttgt

SEQ ID NO: 724 - protein, 214 aa, synthetic construct; identical to SEQ ID NO: 580
  REGION 1..214: note = source = /note="Description of Artificial Sequence: Synthetic polypeptide"

SEQ ID NO: 725 - protein, 685 aa, synthetic construct
  REGION 1..685: note = source = /note="Description of Artificial Sequence: Synthetic polypeptide"
EVQLVESGGGLVQPGRSLRLSCAASGFTFDDYAMHWVRQAPGKKLEWVSAITWNSGHIDYADSVEGRFTISRDNAKNSLYLQMNSLRAEDTAVYYCAKVSYLSTASSLDYWGQGTLVTVSSASTKGPSVFPLAPSSKSTSGGTAALGCLVKDYFPEPVTVSWNSGALTSGVHTFPAVLQSSGLYSLKSVVTVPSSSLGTQTYICNVNHKPSNTKVDKKVEPKSCDKTHTCPPCPAPELLGGPSVFLFPPKPKDTLMISRTPEVTCVVVDVSHEDPEVKFNWYVDGVEVHNAKTKPCEEQYGSTYRCVSVLTVLHQDWLNGKEYKCKVSNKALPAPIEKTISKAKGQPREPQVYTLPPSREEMTKNQVSLTCLVKGFYPSDIAVEWESNGQPENNYKTTPPVLDSDGSFFLYSKLTVDKSRWQQGNVFSCSVMHEALHNHYTQKSLSLSPGGGGSGGGGSQVQLQQSGAGLLKPSETLSLTCAVHGGSFSGYYWNWIRQPPGKGLEWIGEINHAGNTNYNPSLKSRVTISLDTSKNQFSLTLTSVTAADTAVYYCARGYCRSTTCYFDYWGKGTLVTVSSTVAAPSVFIFPPSDEQLKSGTASVVCLLNNFYPREAKVQWKVDNALQSGNSQESVTEQDSKDSTYSLESTLTLSKADYEKHKVYACEVTHQGLSSPVTKSFNRGEC

SEQ ID NO: 726 - protein, 211 aa, synthetic construct
  REGION 1..211: note = source = /note="Description of Artificial Sequence: Synthetic polypeptide"
EIVLTQSPGTLSLSPGERATLSCRASQSVRSSYLAWYQQKPGQEPRLLIYGASSRATGIPDRFSGSGSGTDFTLTISRLEPEDFAVYYCQQYGSSPTFGQGTRLEIKRASTKGPSVFPLAPSSKSTSGGTAALGCLVKDYFPEPVTVSWNSGALTSGVHTFPAVLQSSGLYSLKSVVTVPSSSLGTQTYICNVNHKPSNTKVDKKVEPKSC

SEQ ID NO: 727 - DNA, 642 bp, synthetic construct; identical to SEQ ID NO: 577
  misc_feature 1..642: note = source = /note="Description of Artificial Sequence: Synthetic polynucleotide"
  source 1..642: mol_type = other DNA

SEQ ID NO: 728 - DNA, 2049 bp, synthetic construct
  misc_feature 1..2049: note = source = /note="Description of Artificial Sequence: Synthetic polynucleotide"
  source 1..2049: mol_type = other DNA
gaggtacaactggtggaatcaggtggaggtttggtgcagccggggagatcgctcaggcttagctgtgcggcatcggggtttactttcgatgattatgcgatgcattgggtccggcaagcgcctggaaaaaagctcgagtgggtttccgccattacgtggaatagcggacacatcgattatgcagacagtgtggagggcagattcacaatctcacgagacaatgctaagaacagcctgtaccttcagatgaactcacttcgcgcggaagataccgccgtatactactgcgccaaagtctcctacttgtctacagcttcgtcgctcgactattggggtcaaggaacgttggtcaccgtctctagtgcctccaccaagggcccatcggtcttccccctggcaccctcctccaagagcacctctgggggcacagcggccctgggctgcctggtcaaggactacttccccgaaccggtgacggtgtcgtggaactcaggcgccctgaccagcggcgtgcacaccttcccggctgtcctacagtcctcaggactctactccctcaaaagcgtggtgaccgtgccctccagcagcttgggcacccagacctacatctgcaacgtgaatcacaagcccagcaacaccaaggtggacaagaaagttgagcccaaatcttgtgacaaaactcacacatgcccaccgtgcccagcacctgaactcctggggggaccgtcagtcttcctcttccccccaaaacccaaggacaccctcatgatctcccggacccctgaggtcacatgcgtggtggtggacgtgagccacgaagaccctgaggtcaagttcaactggtacgtggacggcgtggaggtgcataatgccaagacaaagccgtgtgaggagcagtacggcagcacgtaccgttgtgtcagcgtcctcaccgtcctgcaccaggactggctgaatggcaaggagtacaagtgcaaggtctccaacaaagccctcccagcccccatcgagaaaaccatctccaaagccaaagggcagccccgagaaccacaggtgtacaccctgcccccatcccgggaggagatgaccaagaaccaggtcagcctgacctgcctggtcaaaggcttctatcccagcgacatcgccgtggagtgggagagcaatgggcagccggagaacaactacaagaccacgcctcccgtgctggactccgacggctccttcttcctctatagcaagctcaccgtggacaagagcaggtggcagcaggggaacgtcttctcatgctccgtgatgcatgaggctctgcacaaccactacacgcagaagagcctctccctgtctccgggtggtggcggatcgggaggtggcggatcccaggtgcagctgcaggagtcgggcccaggactggtgaagccttcggagaccctgtccctcacctgcactgtctctggtggctccatcagtagttacttctggagctggattcggcagcccccaggtaagggactggagtggattggctatatctattacagtgggcagaccaaatacaacccctccctcaagagtcgagtcaccatatcaatagacacgtccaagaaccagttctccctgaagctgagctctgtgaccgctgcggacacggccgtgtattactgtgcgagagaaactgggagctactacggctttgactactggggcaagggaaccctggtcaccgtctcctcaactgtggctgcaccatctgtcttcatcttcccgccatctgatgagcagttgaaatctggaactgcctctgttgtgtgcctgctgaataacttctatcccagagaggccaaagtacagtggaaggtggataacgccctccaatcgggtaactcccaggagagtgtcacagagcaggacagcaaggacagcacctacagcctcgaaagcaccctgacgctgagcaaagcagactacgagaaacacaaagtctacgcctgcgaagtcacccatcagggcctgagctcgcccgtcacaaagagcttcaacaggggagagtgt

SEQ ID NO: 729 - DNA, 633 bp, synthetic construct
  misc_feature 1..633: note = source = /note="Description of Artificial Sequence: Synthetic polynucleotide"
  source 1..633: mol_type = other DNA
gacatccagatgacccagtctccatcctccctgtctgcatctgtaggagacagagtcaccatcacttgccgggcaagtcagagcattaacaactatttaaattggtatcagcagagaccagggaaagaacctaagctcctgatctatgctgcatccagtttgcaaagtggggtcccatcaaggttcagtggcagtggatctgggacagatttcactctcaccatcagcagtctgcaacctgaagattttgcaacttactactgtcaacagagttacagtacccctcggacgttcggccaagggaccaagctggaaatcaaacgagcctccaccaagggcccatcggtcttccccctggcaccctcctccaagagcacctctgggggcacagcggccctgggctgcctggtcaaggactacttccccgaaccggtgacggtgtcgtggaactcaggcgccctgaccagcggcgtgcacaccttcccggctgtcctacagtcctcaggactctactccctcaaaagcgtggtgaccgtgccctccagcagcttgggcacccagacctacatctgcaacgtgaatcacaagcccagcaacaccaaggtggacaagaaagttgagcccaaatcttgt

SEQ ID NO: 730 - protein, 214 aa, synthetic construct; identical to SEQ ID NO: 580
  REGION 1..214: note = source = /note="Description of Artificial Sequence: Synthetic polypeptide"

SEQ ID NO: 731 - protein, 683 aa, synthetic construct
  REGION 1..683: note = source = /note="Description of Artificial Sequence: Synthetic polypeptide"
EVQLVESGGGLVQPGRSLRLSCAASGFTFDDYAMHWVRQAPGKKLEWVSAITWNSGHIDYADSVEGRFTISRDNAKNSLYLQMNSLRAEDTAVYYCAKVSYLSTASSLDYWGQGTLVTVSSASTKGPSVFPLAPSSKSTSGGTAALGCLVKDYFPEPVTVSWNSGALTSGVHTFPAVLQSSGLYSLKSVVTVPSSSLGTQTYICNVNHKPSNTKVDKKVEPKSCDKTHTCPPCPAPELLGGPSVFLFPPKPKDTLMISRTPEVTCVVVDVSHEDPEVKFNWYVDGVEVHNAKTKPCEEQYGSTYRCVSVLTVLHQDWLNGKEYKCKVSNKALPAPIEKTISKAKGQPREPQVYTLPPSREEMTKNQVSLTCLVKGFYPSDIAVEWESNGQPENNYKTTPPVLDSDGSFFLYSKLTVDKSRWQQGNVFSCSVMHEALHNHYTQKSLSLSPGGGGSGGGGSQVQLQESGPGLVKPSETLSLTCTVSGGSISSYFWSWIRQPPGKGLEWIGYIYYSGQTKYNPSLKSRVTISIDTSKNQFSLKLSSVTAADTAVYYCARETGSYYGFDYWGKGTLVTVSSTVAAPSVFIFPPSDEQLKSGTASVVCLLNNFYPREAKVQWKVDNALQSGNSQESVTEQDSKDSTYSLESTLTLSKADYEKHKVYACEVTHQGLSSPVTKSFNRGEC

SEQ ID NO: 732 - protein, 211 aa, synthetic construct
  REGION 1..211: note = source = /note="Description of Artificial Sequence: Synthetic polypeptide"
DIQMTQSPSSLSASVGDRVTITCRASQSINNYLNWYQQRPGKEPKLLIYAASSLQSGVPSRFSGSGSGTDFTLTISSLQPEDFATYYCQQSYSTPRTFGQGTKLEIKRASTKGPSVFPLAPSSKSTSGGTAALGCLVKDYFPEPVTVSWNSGALTSGVHTFPAVLQSSGLYSLKSVVTVPSSSLGTQTYICNVNHKPSNTKVDKKVEPKSC

SEQ ID NO: 733 - DNA, 642 bp, synthetic construct; identical to SEQ ID NO: 577
  misc_feature 1..642: note = source = /note="Description of Artificial Sequence: Synthetic polynucleotide"
  source 1..642: mol_type = other DNA

SEQ ID NO: 734 - DNA, 2070 bp, synthetic construct
  misc_feature 1..2070: note = source = /note="Description of Artificial Sequence: Synthetic polynucleotide"
  source 1..2070: mol_type = other DNA
gaggtacaactggtggaatcaggtggaggtttggtgcagccggggagatcgctcaggcttagctgtgcggcatcggggtttactttcgatgattatgcgatgcattgggtccggcaagcgcctggaaaaaagctcgagtgggtttccgccattacgtggaatagcggacacatcgattatgcagacagtgtggagggcagattcacaatctcacgagacaatgctaagaacagcctgtaccttcagatgaactcacttcgcgcggaagataccgccgtatactactgcgccaaagtctcctacttgtctacagcttcgtcgctcgactattggggtcaaggaacgttggtcaccgtctctagtgcctccaccaagggcccatcggtcttccccctggcaccctcctccaagagcacctctgggggcacagcggccctgggctgcctggtcaaggactacttccccgaaccggtgacggtgtcgtggaactcaggcgccctgaccagcggcgtgcacaccttcccggctgtcctacagtcctcaggactctactccctcaaaagcgtggtgaccgtgccctccagcagcttgggcacccagacctacatctgcaacgtgaatcacaagcccagcaacaccaaggtggacaagaaagttgagcccaaatcttgtgacaaaactcacacatgcccaccgtgcccagcacctgaactcctggggggaccgtcagtcttcctcttccccccaaaacccaaggacaccctcatgatctcccggacccctgaggtcacatgcgtggtggtggacgtgagccacgaagaccctgaggtcaagttcaactggtacgtggacggcgtggaggtgcataatgccaagacaaagccgtgtgaggagcagtacggcagcacgtaccgttgtgtcagcgtcctcaccgtcctgcaccaggactggctgaatggcaaggagtacaagtgcaaggtctccaacaaagccctcccagcccccatcgagaaaaccatctccaaagccaaagggcagccccgagaaccacaggtgtacaccctgcccccatcccgggaggagatgaccaagaaccaggtcagcctgacctgcctggtcaaaggcttctatcccagcgacatcgccgtggagtgggagagcaatgggcagccggagaacaactacaagaccacgcctcccgtgctggactccgacggctccttcttcctctatagcaagctcaccgtggacaagagcaggtggcagcaggggaacgtcttctcatgctccgtgatgcatgaggctctgcacaaccactacacgcagaagagcctctccctgtctccgggtggtggcggatcgggaggtggcggatcccaggtacagttgcaggagtcaggtccaggactggtgaagccctcggagaccctctcactcacctgtaccatctccggggacagtgtctctaccaacagtgttgcttggaactggattaggcagcccccagggaaaggccttgagtggataggaaggacatactacaggtccaagtggtataatgattatgcagtttctctgaaaagtcgagtaaccatcagcccagacacatccaagaaccagttctccctgaagctgagctctgtgactgccgcggacacggctgtgtattactgtgcaagagaggatggggatagctactaccgctacggtatggacgtctggggcaaagggaccacggtcaccgtctcctcaactgtggctgcaccatctgtcttcatcttcccgccatctgatgagcagttgaaatctggaactgcctctgttgtgtgcctgctgaataacttctatcccagagaggccaaagtacagtggaaggtggataacgccctccaatcgggtaactcccaggagagtgtcacagagcaggacagcaaggacagcacctacagcctcgaaagcaccctgacgctgagcaaagcagactacgagaaacacaaagtctacgcctgcgaagtcacccatcagggcctgagctcgcccgtcacaaagagcttcaacaggggagagtgt

SEQ ID NO: 735 - DNA, 651 bp, synthetic construct
  misc_feature 1..651: note = source = /note="Description of Artificial Sequence: Synthetic polynucleotide"
  source 1..651: mol_type = other DNA
gacatccagatgacccagtctccaagctccctgtctgcgtctgtgggcgatagggtcaccatcacttgcaggtccagccagagtgtgttatacagctccaacaataagaactacttagtttggtaccagcagaaaccaggaaaggaacctaaactgctcatttactgggcatctacccgggaatccggggtccctagtcgattcagtggcagcgggtctgggacagatttcactctcaccatcagcagcctgcagcctgaagatgtggcaacttattactgtcagcaatattataagactcctctcactttcggcggagggaccaaggtggagatcaaacgagcctccaccaagggcccatcggtcttccccctggcaccctcctccaagagcacctctgggggcacagcggccctgggctgcctggtcaaggactacttccccgaaccggtgacggtgtcgtggaactcaggcgccctgaccagcggcgtgcacaccttcccggctgtcctacagtcctcaggactctactccctcaaaagcgtggtgaccgtgccctccagcagcttgggcacccagacctacatctgcaacgtgaatcacaagcccagcaacaccaaggtggacaagaaagttgagcccaaatcttgt

SEQ ID NO: 736 - protein, 214 aa, synthetic construct; identical to SEQ ID NO: 580
  REGION 1..214: note = source = /note="Description of Artificial Sequence: Synthetic polypeptide"

SEQ ID NO: 737 - protein, 690 aa, synthetic construct
  REGION 1..690: note = source = /note="Description of Artificial Sequence: Synthetic polypeptide"
EVQLVESGGGLVQPGRSLRLSCAASGFTFDDYAMHWVRQAPGKKLEWVSAITWNSGHIDYADSVEGRFTISRDNAKNSLYLQMNSLRAEDTAVYYCAKVSYLSTASSLDYWGQGTLVTVSSASTKGPSVFPLAPSSKSTSGGTAALGCLVKDYFPEPVTVSWNSGALTSGVHTFPAVLQSSGLYSLKSVVTVPSSSLGTQTYICNVNHKPSNTKVDKKVEPKSCDKTHTCPPCPAPELLGGPSVFLFPPKPKDTLMISRTPEVTCVVVDVSHEDPEVKFNWYVDGVEVHNAKTKPCEEQYGSTYRCVSVLTVLHQDWLNGKEYKCKVSNKALPAPIEKTISKAKGQPREPQVYTLPPSREEMTKNQVSLTCLVKGFYPSDIAVEWESNGQPENNYKTTPPVLDSDGSFFLYSKLTVDKSRWQQGNVFSCSVMHEALHNHYTQKSLSLSPGGGGSGGGGSQVQLQESGPGLVKPSETLSLTCTISGDSVSTNSVAWNWIRQPPGKGLEWIGRTYYRSKWYNDYAVSLKSRVTISPDTSKNQFSLKLSSVTAADTAVYYCAREDGDSYYRYGMDVWGKGTTVTVSSTVAAPSVFIFPPSDEQLKSGTASVVCLLNNFYPREAKVQWKVDNALQSGNSQESVTEQDSKDSTYSLESTLTLSKADYEKHKVYACEVTHQGLSSPVTKSFNRGEC

SEQ ID NO: 738 - protein, 217 aa, synthetic construct
  REGION 1..217: note = source = /note="Description of Artificial Sequence: Synthetic polypeptide"
DIQMTQSPSSLSASVGDRVTITCRSSQSVLYSSNNKNYLVWYQQKPGKEPKLLIYWASTRESGVPSRFSGSGSGTDFTLTISSLQPEDVATYYCQQYYKTPLTFGGGTKVEIKRASTKGPSVFPLAPSSKSTSGGTAALGCLVKDYFPEPVTVSWNSGALTSGVHTFPAVLQSSGLYSLKSVVTVPSSSLGTQTYICNVNHKPSNTKVDKKVEPKSC

SEQ ID NO: 739 - DNA, 651 bp, synthetic construct; identical to SEQ ID NO: 595
  misc_feature 1..651: note = source = /note="Description of Artificial Sequence: Synthetic polynucleotide"
  source 1..651: mol_type = other DNA

SEQ ID NO: 740 - DNA, 2040 bp, synthetic construct
  misc_feature 1..2040: note = source = /note="Description of Artificial Sequence: Synthetic polynucleotide"
  source 1..2040: mol_type = other DNA
gaggtgcagctggtgcagtctggagcagaggtgaaaaagcccggggagtctctgaagatctcctgtaagacttctgaatacagctttaccagctactggatcggctgggtgcgccagatgcccgggaaaaaactggagtggatggggatcatctatcttggtgactcagataccagatacagcccgtccttccaaggccaggtcaccatctcagccgacaagtccatcagtaccgcctacctgcagtggagcagcctgaaggcctcggacaccgccatgtattactgtgcgagaagtaactggggtcttgactactggggccagggaaccctggtcaccgtctctagtgcctccaccaagggcccatcggtcttccccctggcaccctcctccaagagcacctctgggggcacagcggccctgggctgcctggtcaaggactacttccccgaaccggtgacggtgtcgtggaactcaggcgccctgaccagcggcgtgcacaccttcccggctgtcctacagtcctcaggactctactccctcaaaagcgtggtgaccgtgccctccagcagcttgggcacccagacctacatctgcaacgtgaatcacaagcccagcaacaccaaggtggacaagaaagttgagcccaaatcttgtgacaaaactcacacatgcccaccgtgcccagcacctgaactcctggggggaccgtcagtcttcctcttccccccaaaacccaaggacaccctcatgatctcccggacccctgaggtcacatgcgtggtggtggacgtgagccacgaagaccctgaggtcaagttcaactggtacgtggacggcgtggaggtgcataatgccaagacaaagccgtgtgaggagcagtacggcagcacgtaccgttgtgtcagcgtcctcaccgtcctgcaccaggactggctgaatggcaaggagtacaagtgcaaggtctccaacaaagccctcccagcccccatcgagaaaaccatctccaaagccaaagggcagccccgagaaccacaggtgtacaccctgcccccatcccgggaggagatgaccaagaaccaggtcagcctgacctgcctggtcaaaggcttctatcccagcgacatcgccgtggagtgggagagcaatgggcagccggagaacaactacaagaccacgcctcccgtgctggactccgacggctccttcttcctctatagcaagctcaccgtggacaagagcaggtggcagcaggggaacgtcttctcatgctccgtgatgcatgaggctctgcacaaccactacacgcagaagagcctctccctgtctccgggtggtggcggatcgggaggtggcggatcccaggtgcagttacagcagtcgggcgcaggactgttgaagccttcggagaccctgtccctcacctgcgctgtccatggtgggtccttcagtggttactactggaactggattcgccagccaccagggaaggggctagagtggattggggaaatcaatcatgctggaaacaccaactacaacccgtccctcaagagtcgagtcaccatatcattagacacgtccaagaaccagttctccctgacgctgacctctgtgaccgccgcggacacggctgtgtattactgtgcgagaggatattgtagaagtaccacctgctactttgactactggggcaagggaaccctagtcaccgtctcctcaactgtggctgcaccatctgtcttcatcttcccgccatctgatgagcagttgaaatctggaactgcctctgttgtgtgcctgctgaataacttctatcccagagaggccaaagtacagtggaaggtggataacgccctccaatcgggtaactcccaggagagtgtcacagagcaggacagcaaggacagcacctacagcctcgaaagcaccctgacgctgagcaaagcagactacgagaaacacaaagtctacgcctgcgaagtcacccatcagggcctgagctcgcccgtcacaaagagcttcaacaggggagagtgt

SEQ ID NO: 741 - DNA, 633 bp, synthetic construct; identical to SEQ ID NO: 723
  misc_feature 1..633: note = source = /note="Description of Artificial Sequence: Synthetic polynucleotide"
  source 1..633: mol_type = other DNA

SEQ ID NO: 742 - protein, 217 aa, synthetic construct; identical to SEQ ID NO: 598
  REGION 1..217: note = source = /note="Description of Artificial Sequence: Synthetic polypeptide"

SEQ ID NO: 743 - protein, 680 aa, synthetic construct
  REGION 1..680: note = source = /note="Description of Artificial Sequence: Synthetic polypeptide"
EVQLVQSGAEVKKPGESLKISCKTSEYSFTSYWIGWVRQMPGKKLEWMGIIYLGDSDTRYSPSFQGQVTISADKSISTAYLQWSSLKASDTAMYYCARSNWGLDYWGQGTLVTVSSASTKGPSVFPLAPSSKSTSGGTAALGCLVKDYFPEPVTVSWNSGALTSGVHTFPAVLQSSGLYSLKSVVTVPSSSLGTQTYICNVNHKPSNTKVDKKVEPKSCDKTHTCPPCPAPELLGGPSVFLFPPKPKDTLMISRTPEVTCVVVDVSHEDPEVKFNWYVDGVEVHNAKTKPCEEQYGSTYRCVSVLTVLHQDWLNGKEYKCKVSNKALPAPIEKTISKAKGQPREPQVYTLPPSREEMTKNQVSLTCLVKGFYPSDIAVEWESNGQPENNYKTTPPVLDSDGSFFLYSKLTVDKSRWQQGNVFSCSVMHEALHNHYTQKSLSLSPGGGGSGGGGSQVQLQQSGAGLLKPSETLSLTCAVHGGSFSGYYWNWIRQPPGKGLEWIGEINHAGNTNYNPSLKSRVTISLDTSKNQFSLTLTSVTAADTAVYYCARGYCRSTTCYFDYWGKGTLVTVSSTVAAPSVFIFPPSDEQLKSGTASVVCLLNNFYPREAKVQWKVDNALQSGNSQESVTEQDSKDSTYSLESTLTLSKADYEKHKVYACEVTHQGLSSPVTKSFNRGEC

SEQ ID NO: 744 - protein, 211 aa, synthetic construct; identical to SEQ ID NO: 726
  REGION 1..211: note = source = /note="Description of Artificial Sequence: Synthetic polypeptide"

SEQ ID NO: 745 - DNA, 651 bp, synthetic construct; identical to SEQ ID NO: 595
  misc_feature 1..651: note = source = /note="Description of Artificial Sequence: Synthetic polynucleotide"
  source 1..651: mol_type = other DNA

SEQ ID NO: 746 - DNA, 2034 bp, synthetic construct
  misc_feature 1..2034: note = source = /note="Description of Artificial Sequence: Synthetic polynucleotide"
  source 1..2034: mol_type = other DNA
gaggtgcagctggtgcagtctggagcagaggtgaaaaagcccggggagtctctgaagatctcctgtaagacttctgaatacagctttaccagctactggatcggctgggtgcgccagatgcccgggaaaaaactggagtggatggggatcatctatcttggtgactcagataccagatacagcccgtccttccaaggccaggtcaccatctcagccgacaagtccatcagtaccgcctacctgcagtggagcagcctgaaggcctcggacaccgccatgtattactgtgcgagaagtaactggggtcttgactactggggccagggaaccctggtcaccgtctctagtgcctccaccaagggcccatcggtcttccccctggcaccctcctccaagagcacctctgggggcacagcggccctgggctgcctggtcaaggactacttccccgaaccggtgacggtgtcgtggaactcaggcgccctgaccagcggcgtgcacaccttcccggctgtcctacagtcctcaggactctactccctcaaaagcgtggtgaccgtgccctccagcagcttgggcacccagacctacatctgcaacgtgaatcacaagcccagcaacaccaaggtggacaagaaagttgagcccaaatcttgtgacaaaactcacacatgcccaccgtgcccagcacctgaactcctggggggaccgtcagtcttcctcttccccccaaaacccaaggacaccctcatgatctcccggacccctgaggtcacatgcgtggtggtggacgtgagccacgaagaccctgaggtcaagttcaactggtacgtggacggcgtggaggtgcataatgccaagacaaagccgtgtgaggagcagtacggcagcacgtaccgttgtgtcagcgtcctcaccgtcctgcaccaggactggctgaatggcaaggagtacaagtgcaaggtctccaacaaagccctcccagcccccatcgagaaaaccatctccaaagccaaagggcagccccgagaaccacaggtgtacaccctgcccccatcccgggaggagatgaccaagaaccaggtcagcctgacctgcctggtcaaaggcttctatcccagcgacatcgccgtggagtgggagagcaatgggcagccggagaacaactacaagaccacgcctcccgtgctggactccgacggctccttcttcctctatagcaagctcaccgtggacaagagcaggtggcagcaggggaacgtcttctcatgctccgtgatgcatgaggctctgcacaaccactacacgcagaagagcctctccctgtctccgggtggtggcggatcgggaggtggcggatcccaggtgcagctgcaggagtcgggcccaggactggtgaagccttcggagaccctgtccctcacctgcactgtctctggtggctccatcagtagttacttctggagctggattcggcagcccccaggtaagggactggagtggattggctatatctattacagtgggcagaccaaatacaacccctccctcaagagtcgagtcaccatatcaatagacacgtccaagaaccagttctccctgaagctgagctctgtgaccgctgcggacacggccgtgtattactgtgcgagagaaactgggagctactacggctttgactactggggcaagggaaccctggtcaccgtctcctcaactgtggctgcaccatctgtcttcatcttcccgccatctgatgagcagttgaaatctggaactgcctctgttgtgtgcctgctgaataacttctatcccagagaggccaaagtacagtggaaggtggataacgccctccaatcgggtaactcccaggagagtgtcacagagcaggacagcaaggacagcacctacagcctcgaaagcaccctgacgctgagcaaagcagactacgagaaacacaaagtctacgcctgcgaagtcacccatcagggcctgagctcgcccgtcacaaagagcttcaacaggggagagtgt

SEQ ID NO: 747 - DNA, 633 bp, synthetic construct; identical to SEQ ID NO: 729
  misc_feature 1..633: note = source = /note="Description of Artificial Sequence: Synthetic polynucleotide"
  source 1..633: mol_type = other DNA

SEQ ID NO: 748 - protein, 217 aa, synthetic construct; identical to SEQ ID NO: 598
  REGION 1..217: note = source = /note="Description of Artificial Sequence: Synthetic polypeptide"

SEQ ID NO: 749 - protein, 678 aa, synthetic construct
  REGION 1..678: note = source = /note="Description of Artificial Sequence: Synthetic polypeptide"
EVQLVQSGAEVKKPGESLKISCKTSEYSFTSYWIGWVRQMPGKKLEWMGIIYLGDSDTRYSPSFQGQVTISADKSISTAYLQWSSLKASDTAMYYCARSNWGLDYWGQGTLVTVSSASTKGPSVFPLAPSSKSTSGGTAALGCLVKDYFPEPVTVSWNSGALTSGVHTFPAVLQSSGLYSLKSVVTVPSSSLGTQTYICNVNHKPSNTKVDKKVEPKSCDKTHTCPPCPAPELLGGPSVFLFPPKPKDTLMISRTPEVTCVVVDVSHEDPEVKFNWYVDGVEVHNAKTKPCEEQYGSTYRCVSVLTVLHQDWLNGKEYKCKVSNKALPAPIEKTISKAKGQPREPQVYTLPPSREEMTKNQVSLTCLVKGFYPSDIAVEWESNGQPENNYKTTPPVLDSDGSFFLYSKLTVDKSRWQQGNVFSCSVMHEALHNHYTQKSLSLSPGGGGSGGGGSQVQLQESGPGLVKPSETLSLTCTVSGGSISSYFWSWIRQPPGKGLEWIGYIYYSGQTKYNPSLKSRVTISIDTSKNQFSLKLSSVTAADTAVYYCARETGSYYGFDYWGKGTLVTVSSTVAAPSVFIFPPSDEQLKSGTASVVCLLNNFYPREAKVQWKVDNALQSGNSQESVTEQDSKDSTYSLESTLTLSKADYEKHKVYACEVTHQGLSSPVTKSFNRGEC

SEQ ID NO: 750 - protein, 211 aa, synthetic construct; identical to SEQ ID NO: 732
  REGION 1..211: note = source = /note="Description of Artificial Sequence: Synthetic polypeptide"

SEQ ID NO: 751 - DNA, 651 bp, synthetic construct; identical to SEQ ID NO: 595
  misc_feature 1..651: note = source = /note="Description of Artificial Sequence: Synthetic polynucleotide"
  source 1..651: mol_type = other DNA

SEQ ID NO: 752 - DNA, 2055 bp, synthetic construct
  misc_feature 1..2055: note = source = /note="Description of Artificial Sequence: Synthetic polynucleotide"
  source 1..2055: mol_type = other DNA
gaggtgcagctggtgcagtctggagcagaggtgaaaaagcccggggagtctctgaagatctcctgtaagacttctgaatacagctttaccagctactggatcggctgggtgcgccagatgcccgggaaaaaactggagtggatggggatcatctatcttggtgactcagataccagatacagcccgtccttccaaggccaggtcaccatctcagccgacaagtccatcagtaccgcctacctgcagtggagcagcctgaaggcctcggacaccgccatgtattactgtgcgagaagtaactggggtcttgactactggggccagggaaccctggtcaccgtctctagtgcctccaccaagggcccatcggtcttccccctggcaccctcctccaagagcacctctgggggcacagcggccctgggctgcctggtcaaggactacttccccgaaccggtgacggtgtcgtggaactcaggcgccctgaccagcggcgtgcacaccttcccggctgtcctacagtcctcaggactctactccctcaaaagcgtggtgaccgtgccctccagcagcttgggcacccagacctacatctgcaacgtgaatcacaagcccagcaacaccaaggtggacaagaaagttgagcccaaatcttgtgacaaaactcacacatgcccaccgtgcccagcacctgaactcctggggggaccgtcagtcttcctcttccccccaaaacccaaggacaccctcatgatctcccggacccctgaggtcacatgcgtggtggtggacgtgagccacgaagaccctgaggtcaagttcaactggtacgtggacggcgtggaggtgcataatgccaagacaaagccgtgtgaggagcagtacggcagcacgtaccgttgtgtcagcgtcctcaccgtcctgcaccaggactggctgaatggcaaggagtacaagtgcaaggtctccaacaaagccctcccagcccccatcgagaaaaccatctccaaagccaaagggcagccccgagaaccacaggtgtacaccctgcccccatcccgggaggagatgaccaagaaccaggtcagcctgacctgcctggtcaaaggcttctatcccagcgacatcgccgtggagtgggagagcaatgggcagccggagaacaactacaagaccacgcctcccgtgctggactccgacggctccttcttcctctatagcaagctcaccgtggacaagagcaggtggcagcaggggaacgtcttctcatgctccgtgatgcatgaggctctgcacaaccactacacgcagaagagcctctccctgtctccgggtggtggcggatcgggaggtggcggatcccaggtacagttgcaggagtcaggtccaggactggtgaagccctcggagaccctctcactcacctgtaccatctccggggacagtgtctctaccaacagtgttgcttggaactggattaggcagcccccagggaaaggccttgagtggataggaaggacatactacaggtccaagtggtataatgattatgcagtttctctgaaaagtcgagtaaccatcagcccagacacatccaagaaccagttctccctgaagctgagctctgtgactgccgcggacacggctgtgtattactgtgcaagagaggatggggatagctactaccgctacggtatggacgtctggggcaaagggaccacggtcaccgtctcctcaactgtggctgcaccatctgtcttcatcttcccgccatctgatgagcagttgaaatctggaactgcctctgttgtgtgcctgctgaataacttctatcccagagaggccaaagtacagtggaaggtggataacgccctccaatcgggtaactcccaggagagtgtcacagagcaggacagcaaggacagcacctacagcctcgaaagcaccctgacgctgagcaaagcagactacgagaaacacaaagtctacgcctgcgaagtcacccatcagggcctgagctcgcccgtcacaaagagcttcaacaggggagagtgt

SEQ ID NO: 753 - DNA, 651 bp, synthetic construct; identical to SEQ ID NO: 735
  misc_feature 1..651: note = source = /note="Description of Artificial Sequence: Synthetic polynucleotide"
  source 1..651: mol_type = other DNA

SEQ ID NO: 754 - protein, 217 aa, synthetic construct; identical to SEQ ID NO: 598
  REGION 1..217: note = source = /note="Description of Artificial Sequence: Synthetic polypeptide"

SEQ ID NO: 755 - protein, 685 aa, synthetic construct
  REGION 1..685: note = source = /note="Description of Artificial Sequence: Synthetic polypeptide"
EVQLVQSGAEVKKPGESLKISCKTSEYSFTSYWIGWVRQMPGKKLEWMGIIYLGDSDTRYSPSFQGQVTISADKSISTAYLQWSSLKASDTAMYYCARSNWGLDYWGQGTLVTVSSASTKGPSVFPLAPSSKSTSGGTAALGCLVKDYFPEPVTVSWNSGALTSGVHTFPAVLQSSGLYSLKSVVTVPSSSLGTQTYICNVNHKPSNTKVDKKVEPKSCDKTHTCPPCPAPELLGGPSVFLFPPKPKDTLMISRTPEVTCVVVDVSHEDPEVKFNWYVDGVEVHNAKTKPCEEQYGSTYRCVSVLTVLHQDWLNGKEYKCKVSNKALPAPIEKTISKAKGQPREPQVYTLPPSREEMTKNQVSLTCLVKGFYPSDIAVEWESNGQPENNYKTTPPVLDSDGSFFLYSKLTVDKSRWQQGNVFSCSVMHEALHNHYTQKSLSLSPGGGGSGGGGSQVQLQESGPGLVKPSETLSLTCTISGDSVSTNSVAWNWIRQPPGKGLEWIGRTYYRSKWYNDYAVSLKSRVTISPDTSKNQFSLKLSSVTAADTAVYYCAREDGDSYYRYGMDVWGKGTTVTVSSTVAAPSVFIFPPSDEQLKSGTASVVCLLNNFYPREAKVQWKVDNALQSGNSQESVTEQDSKDSTYSLESTLTLSKADYEKHKVYACEVTHQGLSSPVTKSFNRGEC

SEQ ID NO: 756 - protein, 217 aa, synthetic construct; identical to SEQ ID NO: 738
  REGION 1..217: note = source = /note="Description of Artificial Sequence: Synthetic polypeptide"

SEQ ID NO: 757 - DNA, 642 bp, synthetic construct; identical to SEQ ID NO: 613
  misc_feature 1..642: note = source = /note="Description of Artificial Sequence: Synthetic polynucleotide"
  source 1..642: mol_type = other DNA

SEQ ID NO: 758 - DNA, 2055 bp, synthetic construct
  misc_feature 1..2055: note = source = /note="Description of Artificial Sequence: Synthetic polynucleotide"
  source 1..2055: mol_type = other DNA
caggtgcagttacagcagtcgggcgcaggactgttgaagccttcggagaccctgtccctcacctgcgctgtccatggtgggtccttcagtggttactactggaactggatccgccagccaccagggaagaagctagagtggattggggaaatcaatcatgctggaaacaccaactacaacccgtccctcaagagtcgagtcaccatatcattagacacgtccaagaaccagttctccctgacgctgacctctgtgaccgccgcggacacggctgtgtattactgtgcgagaggatattgtagaagtaccacctgctactttgactactggggccagggaaccctagtcaccgtctcctcagcctccaccaagggcccatcggtcttccccctggcaccctcctccaagagcacctctgggggcacagcggccctgggctgcctggtcaaggactacttccccgaaccggtgacggtgtcgtggaactcaggcgccctgaccagcggcgtgcacaccttcccggctgtcctacagtcctcaggactctactccctcaaaagcgtggtgaccgtgccctccagcagcttgggcacccagacctacatctgcaacgtgaatcacaagcccagcaacaccaaggtggacaagaaagttgagcccaaatcttgtgacaaaactcacacatgcccaccgtgcccagcacctgaactcctggggggaccgtcagtcttcctcttccccccaaaacccaaggacaccctcatgatctcccggacccctgaggtcacatgcgtggtggtggacgtgagccacgaagaccctgaggtcaagttcaactggtacgtggacggcgtggaggtgcataatgccaagacaaagccgtgtgaggagcagtacggcagcacgtaccgttgtgtcagcgtcctcaccgtcctgcaccaggactggctgaatggcaaggagtacaagtgcaaggtctccaacaaagccctcccagcccccatcgagaaaaccatctccaaagccaaagggcagccccgagaaccacaggtgtacaccctgcccccatcccgggaggagatgaccaagaaccaggtcagcctgacctgcctggtcaaaggcttctatcccagcgacatcgccgtggagtgggagagcaatgggcagccggagaacaactacaagaccacgcctcccgtgctggactccgacggctccttcttcctctatagcaagctcaccgtggacaagagcaggtggcagcaggggaacgtcttctcatgctccgtgatgcatgaggctctgcacaaccactacacgcagaagagcctctccctgtctccgggtggtggcggatcgggaggtggcggatccgaggtacaactggtggaatcaggtggaggtttggtgcagccggggagatcgctcaggcttagctgtgcggcatcggggtttactttcgatgattatgcgatgcattgggtccggcaagcgcctggaaaagggctcgagtgggtttccgccattacgtggaatagcggacacatcgattatgcagacagtgtggagggcagattcacaatctcacgagacaatgctaagaacagcctgtaccttcagatgaactcacttcgcgcggaagataccgccgtatactactgcgccaaagtctcctacttgtctacagcttcgtcgctcgactattggggtaaaggaacgttggtcaccgtctctagtactgtggctgcaccatctgtcttcatcttcccgccatctgatgagcagttgaaatctggaactgcctctgttgtgtgcctgctgaataacttctatcccagagaggccaaagtacagtggaaggtggataacgccctccaatcgggtaactcccaggagagtgtcacagagcaggacagcaaggacagcacctacagcctcgaaagcaccctgacgctgagcaaagcagactacgagaaacacaaagtctacgcctgcgaagtcacccatcagggcctgagctcgcccgtcacaaagagcttcaacaggggagagtgt

SEQ ID NO: 759 - DNA, 633 bp, synthetic construct
  misc_feature 1..633: note = source = /note="Description of Artificial Sequence: Synthetic polynucleotide"
  source 1..633: mol_type = other DNA
gatatccaaatgacacaatcaccatcgtcgctttcagcgtctgttggcgaccgtgtgacgattacctgtcgcgcgtcccagggaatccggaattacctcgcatggtatcagcaaaaacccggaaaagaaccgaagctcctgatctatgccgcctcgactcttcagagtggtgtgccgtcgaggtttagcgggtccgggtcaggtacggactttactctcacaatttccagcctgcagcccgaagatgtagctacctattactgccagagatacaaccgagcgccttacacattcggacaagggacaaaagtcgagatcaagcgtgcctccaccaagggcccatcggtcttccccctggcaccctcctccaagagcacctctgggggcacagcggccctgggctgcctggtcaaggactacttccccgaaccggtgacggtgtcgtggaactcaggcgccctgaccagcggcgtgcacaccttcccggctgtcctacagtcctcaggactctactccctcaaaagcgtggtgaccgtgccctccagcagcttgggcacccagacctacatctgcaacgtgaatcacaagcccagcaacaccaaggtggacaagaaagttgagcccaaatcttgt

SEQ ID NO: 760 - protein, 214 aa, synthetic construct; identical to SEQ ID NO: 616
  REGION 1..214: note = source = /note="Description of Artificial Sequence: Synthetic polypeptide"

SEQ ID NO: 761 - protein, 685 aa, synthetic construct
  REGION 1..685: note = source = /note="Description of Artificial Sequence: Synthetic polypeptide"
QVQLQQSGAGLLKPSETLSLTCAVHGGSFSGYYWNWIRQPPGKKLEWIGEINHAGNTNYNPSLKSRVTISLDTSKNQFSLTLTSVTAADTAVYYCARGYCRSTTCYFDYWGQGTLVTVSSASTKGPSVFPLAPSSKSTSGGTAALGCLVKDYFPEPVTVSWNSGALTSGVHTFPAVLQSSGLYSLKSVVTVPSSSLGTQTYICNVNHKPSNTKVDKKVEPKSCDKTHTCPPCPAPELLGGPSVFLFPPKPKDTLMISRTPEVTCVVVDVSHEDPEVKFNWYVDGVEVHNAKTKPCEEQYGSTYRCVSVLTVLHQDWLNGKEYKCKVSNKALPAPIEKTISKAKGQPREPQVYTLPPSREEMTKNQVSLTCLVKGFYPSDIAVEWESNGQPENNYKTTPPVLDSDGSFFLYSKLTVDKSRWQQGNVFSCSVMHEALHNHYTQKSLSLSPGGGGSGGGGSEVQLVESGGGLVQPGRSLRLSCAASGFTFDDYAMHWVRQAPGKGLEWVSAITWNSGHIDYADSVEGRFTISRDNAKNSLYLQMNSLRAEDTAVYYCAKVSYLSTASSLDYWGKGTLVTVSSTVAAPSVFIFPPSDEQLKSGTASVVCLLNNFYPREAKVQWKVDNALQSGNSQESVTEQDSKDSTYSLESTLTLSKADYEKHKVYACEVTHQGLSSPVTKSFNRGEC

SEQ ID NO: 762 - protein, 211 aa, synthetic construct
  REGION 1..211: note = source = /note="Description of Artificial Sequence: Synthetic polypeptide"
DIQMTQSPSSLSASVGDRVTITCRASQGIRNYLAWYQQKPGKEPKLLIYAASTLQSGVPSRFSGSGSGTDFTLTISSLQPEDVATYYCQRYNRAPYTFGQGTKVEIKRASTKGPSVFPLAPSSKSTSGGTAALGCLVKDYFPEPVTVSWNSGALTSGVHTFPAVLQSSGLYSLKSVVTVPSSSLGTQTYICNVNHKPSNTKVDKKVEPKSC

SEQ ID NO: 763 - DNA, 642 bp, synthetic construct; identical to SEQ ID NO: 613
  misc_feature 1..642: note = source = /note="Description of Artificial Sequence: Synthetic polynucleotide"
  source 1..642: mol_type = other DNA

SEQ ID NO: 764 - DNA, 2037 bp, synthetic construct
  misc_feature 1..2037: note = source = /note="Description of Artificial Sequence: Synthetic polynucleotide"
  source 1..2037: mol_type = other DNA
caggtgcagttacagcagtcgggcgcaggactgttgaagccttcggagaccctgtccctcacctgcgctgtccatggtgggtccttcagtggttactactggaactggatccgccagccaccagggaagaagctagagtggattggggaaatcaatcatgctggaaacaccaactacaacccgtccctcaagagtcgagtcaccatatcattagacacgtccaagaaccagttctccctgacgctgacctctgtgaccgccgcggacacggctgtgtattactgtgcgagaggatattgtagaagtaccacctgctactttgactactggggccagggaaccctagtcaccgtctcctcagcctccaccaagggcccatcggtcttccccctggcaccctcctccaagagcacctctgggggcacagcggccctgggctgcctggtcaaggactacttccccgaaccggtgacggtgtcgtggaactcaggcgccctgaccagcggcgtgcacaccttcccggctgtcctacagtcctcaggactctactccctcaaaagcgtggtgaccgtgccctccagcagcttgggcacccagacctacatctgcaacgtgaatcacaagcccagcaacaccaaggtggacaagaaagttgagcccaaatcttgtgacaaaactcacacatgcccaccgtgcccagcacctgaactcctggggggaccgtcagtcttcctcttccccccaaaacccaaggacaccctcatgatctcccggacccctgaggtcacatgcgtggtggtggacgtgagccacgaagaccctgaggtcaagttcaactggtacgtggacggcgtggaggtgcataatgccaagacaaagccgtgtgaggagcagtacggcagcacgtaccgttgtgtcagcgtcctcaccgtcctgcaccaggactggctgaatggcaaggagtacaagtgcaaggtctccaacaaagccctcccagcccccatcgagaaaaccatctccaaagccaaagggcagccccgagaaccacaggtgtacaccctgcccccatcccgggaggagatgaccaagaaccaggtcagcctgacctgcctggtcaaaggcttctatcccagcgacatcgccgtggagtgggagagcaatgggcagccggagaacaactacaagaccacgcctcccgtgctggactccgacggctccttcttcctctatagcaagctcaccgtggacaagagcaggtggcagcaggggaacgtcttctcatgctccgtgatgcatgaggctctgcacaaccactacacgcagaagagcctctccctgtctccgggtggtggcggatcgggaggtggcggatccgaggtgcagctggtgcagtctggagcagaggtgaaaaagcccggggagtctctgaagatctcctgtaagacttctgaatacagctttaccagctactggatcggctgggtgcgccagatgcccgggaaaggcctggagtggatggggatcatctatcttggtgactcagataccagatacagcccgtccttccaaggccaggtcaccatctcagccgacaagtccatcagtaccgcctacctgcagtggagcagcctgaaggcctcggacaccgccatgtattactgtgcgagaagtaactggggtcttgactactggggcaagggaaccctggtcaccgtctctagtcagcccaaggccaaccccactgtcactctgttcccgccctcctctgaggagctccaagccaacaaggccacactagtgtgtctgatcagtgacttctacccgggagctgtgacagtggcctggaaggcagatggcagccccgtcaaggcgggagtggagaccaccaaaccctccaaacagagcaacaacaagtacgcggccgagagctacctgagcctgacgcccgagcagtggaagtcccacagaagctacagctgccaggtcacgcatgaagggagcaccgtggagaagacagtggcccctacagaatgttca

SEQ ID NO: 765 - DNA, 645 bp, synthetic construct
  misc_feature 1..645: note = source = /note="Description of Artificial Sequence: Synthetic polynucleotide"
  source 1..645: mol_type = other DNA
cagtctgtgctgacgcagccgccctcagtgtctggggccccagggcagagggtcaccatctcctgcactgggagcagttccaacatcggggcaggttatgatgtacactggtaccagcagtttccaggaacagaacccaaactcctcatccaaggtaacagcaatcggccctcaggggtccctgaccgattctctggctccaagtctggcacctcagcctccctggccatcactgggctccaggctgaggatgaggctgattattactgccagtcctatgacagcagcctgagtggttcggtgttcggcggagggaccaagctgaccgtcctaggtgcctccaccaagggcccatcggtcttccccctggcaccctcctccaagagcacctctgggggcacagcggccctgggctgcctggtcaaggactacttccccgaaccggtgacggtgtcgtggaactcaggcgccctgaccagcggcgtgcacaccttcccggctgtcctacagtcctcaggactctactccctcaaaagcgtggtgaccgtgccctccagcagcttgggcacccagacctacatctgcaacgtgaatcacaagcccagcaacaccaaggtggacaagaaagttgagcccaaatcttgt

SEQ ID NO: 766 - protein, 214 aa, synthetic construct; identical to SEQ ID NO: 616
  REGION 1..214: note = source = /note="Description of Artificial Sequence: Synthetic polypeptide"

SEQ ID NO: 767 - protein, 679 aa, synthetic construct
  REGION 1..679: note = source = /note="Description of Artificial Sequence: Synthetic polypeptide"
QVQLQQSGAGLLKPSETLSLTCAVHGGSFSGYYWNWIRQPPGKKLEWIGEINHAGNTNYNPSLKSRVTISLDTSKNQFSLTLTSVTAADTAVYYCARGYCRSTTCYFDYWGQGTLVTVSSASTKGPSVFPLAPSSKSTSGGTAALGCLVKDYFPEPVTVSWNSGALTSGVHTFPAVLQSSGLYSLKSVVTVPSSSLGTQTYICNVNHKPSNTKVDKKVEPKSCDKTHTCPPCPAPELLGGPSVFLFPPKPKDTLMISRTPEVTCVVVDVSHEDPEVKFNWYVDGVEVHNAKTKPCEEQYGSTYRCVSVLTVLHQDWLNGKEYKCKVSNKALPAPIEKTISKAKGQPREPQVYTLPPSREEMTKNQVSLTCLVKGFYPSDIAVEWESNGQPENNYKTTPPVLDSDGSFFLYSKLTVDKSRWQQGNVFSCSVMHEALHNHYTQKSLSLSPGGGGSGGGGSEVQLVQSGAEVKKPGESLKISCKTSEYSFTSYWIGWVRQMPGKGLEWMGIIYLGDSDTRYSPSFQGQVTISADKSISTAYLQWSSLKASDTAMYYCARSNWGLDYWGKGTLVTVSSQPKANPTVTLFPPSSEELQANKATLVCLISDFYPGAVTVAWKADGSPVKAGVETTKPSKQSNNKYAAESYLSLTPEQWKSHRSYSCQVTHEGSTVEKTVAPTECS

SEQ ID NO: 768 - protein, 215 aa, synthetic construct
  REGION 1..215: note = source = /note="Description of Artificial Sequence: Synthetic polypeptide"
QSVLTQPPSVSGAPGQRVTISCTGSSSNIGAGYDVHWYQQFPGTEPKLLIQGNSNRPSGVPDRFSGSKSGTSASLAITGLQAEDEADYYCQSYDSSLSGSVFGGGTKLTVLGASTKGPSVFPLAPSSKSTSGGTAALGCLVKDYFPEPVTVSWNSGALTSGVHTFPAVLQSSGLYSLKSVVTVPSSSLGTQTYICNVNHKPSNTKVDKKVEPKSC

SEQ ID NO: 769 - DNA, 642 bp, synthetic construct; identical to SEQ ID NO: 625
  misc_feature 1..642: note = source = /note="Description of Artificial Sequence: Synthetic polynucleotide"
  source 1..642: mol_type = other DNA

SEQ ID NO: 770 - DNA, 2049 bp, synthetic construct
  misc_feature 1..2049: note = source = /note="Description of Artificial Sequence: Synthetic polynucleotide"
  source 1..2049: mol_type = other DNA
caggtgcagctgcaggagtcgggcccaggactggtgaagccttcggagaccctgtccctcacctgcactgtctctggtggctccatcagtagttacttctggagctggatccggcagcccccaggtaagaaactggagtggattggctatatctattacagtgggcagaccaaatacaacccctccctcaagagtcgagtcaccatatcaatagacacgtccaagaaccagttctccctgaagctgagctctgtgaccgctgcggacacggccgtgtattactgtgcgagagaaactgggagctactacggctttgactactggggccagggaaccctggtcaccgtctcctcagcctccaccaagggcccatcggtcttccccctggcaccctcctccaagagcacctctgggggcacagcggccctgggctgcctggtcaaggactacttccccgaaccggtgacggtgtcgtggaactcaggcgccctgaccagcggcgtgcacaccttcccggctgtcctacagtcctcaggactctactccctcaaaagcgtggtgaccgtgccctccagcagcttgggcacccagacctacatctgcaacgtgaatcacaagcccagcaacaccaaggtggacaagaaagttgagcccaaatcttgtgacaaaactcacacatgcccaccgtgcccagcacctgaactcctggggggaccgtcagtcttcctcttccccccaaaacccaaggacaccctcatgatctcccggacccctgaggtcacatgcgtggtggtggacgtgagccacgaagaccctgaggtcaagttcaactggtacgtggacggcgtggaggtgcataatgccaagacaaagccgtgtgaggagcagtacggcagcacgtaccgttgtgtcagcgtcctcaccgtcctgcaccaggactggctgaatggcaaggagtacaagtgcaaggtctccaacaaagccctcccagcccccatcgagaaaaccatctccaaagccaaagggcagccccgagaaccacaggtgtacaccctgcccccatcccgggaggagatgaccaagaaccaggtcagcctgacctgcctggtcaaaggcttctatcccagcgacatcgccgtggagtgggagagcaatgggcagccggagaacaactacaagaccacgcctcccgtgctggactccgacggctccttcttcctctatagcaagctcaccgtggacaagagcaggtggcagcaggggaacgtcttctcatgctccgtgatgcatgaggctctgcacaaccactacacgcagaagagcctctccctgtctccgggtggtggcggatcgggaggtggcggatccgaggtacaactggtggaatcaggtggaggtttggtgcagccggggagatcgctcaggcttagctgtgcggcatcggggtttactttcgatgattatgcgatgcattgggtccggcaagcgcctggaaaagggctcgagtgggtttccgccattacgtggaatagcggacacatcgattatgcagacagtgtggagggcagattcacaatctcacgagacaatgctaagaacagcctgtaccttcagatgaactcacttcgcgcggaagataccgccgtatactactgcgccaaagtctcctacttgtctacagcttcgtcgctcgactattggggtaaaggaacgttggtcaccgtctctagtactgtggctgcaccatctgtcttcatcttcccgccatctgatgagcagttgaaatctggaactgcctctgttgtgtgcctgctgaataacttctatcccagagaggccaaagtacagtggaaggtggataacgccctccaatcgggtaactcccaggagagtgtcacagagcaggacagcaaggacagcacctacagcctcgaaagcaccctgacgctgagcaaagcagactacgagaaacacaaagtctacgcctgcgaagtcacccatcagggcctgagctcgcccgtcacaaagagcttcaacaggggagagtgt

SEQ ID NO: 771 - DNA, 633 bp, synthetic construct; identical to SEQ ID NO: 759
  misc_feature 1..633: note = source = /note="Description of Artificial Sequence: Synthetic polynucleotide"
  source 1..633: mol_type = other DNA

SEQ ID NO: 772 - protein, 214 aa, synthetic construct; identical to SEQ ID NO: 628
  REGION 1..214: note = source = /note="Description of Artificial Sequence: Synthetic polypeptide"

SEQ ID NO: 773 - protein, 683 aa, synthetic construct
  REGION 1..683: note = source = /note="Description of Artificial Sequence: Synthetic polypeptide"
QVQLQESGPGLVKPSETLSLTCTVSGGSISSYFWSWIRQPPGKKLEWIGYIYYSGQTKYNPSLKSRVTISIDTSKNQFSLKLSSVTAADTAVYYCARETGSYYGFDYWGQGTLVTVSSASTKGPSVFPLAPSSKSTSGGTAALGCLVKDYFPEPVTVSWNSGALTSGVHTFPAVLQSSGLYSLKSVVTVPSSSLGTQTYICNVNHKPSNTKVDKKVEPKSCDKTHTCPPCPAPELLGGPSVFLFPPKPKDTLMISRTPEVTCVVVDVSHEDPEVKFNWYVDGVEVHNAKTKPCEEQYGSTYRCVSVLTVLHQDWLNGKEYKCKVSNKALPAPIEKTISKAKGQPREPQVYTLPPSREEMTKNQVSLTCLVKGFYPSDIAVEWESNGQPENNYKTTPPVLDSDGSFFLYSKLTVDKSRWQQGNVFSCSVMHEALHNHYTQKSLSLSPGGGGSGGGGSEVQLVESGGGLVQPGRSLRLSCAASGFTFDDYAMHWVRQAPGKGLEWVSAITWNSGHIDYADSVEGRFTISRDNAKNSLYLQMNSLRAEDTAVYYCAKVSYLSTASSLDYWGKGTLVTVSSTVAAPSVFIFPPSDEQLKSGTASVVCLLNNFYPREAKVQWKVDNALQSGNSQESVTEQDSKDSTYSLESTLTLSKADYEKHKVYACEVTHQGLSSPVTKSFNRGEC

SEQ ID NO: 774 - protein, 211 aa, synthetic construct; identical to SEQ ID NO: 762
  REGION 1..211: note = source = /note="Description of Artificial Sequence: Synthetic polypeptide"

SEQ ID NO: 775 - DNA, 642 bp, synthetic construct; identical to SEQ ID NO: 625
  misc_feature 1..642: note = source = /note="Description of Artificial Sequence: Synthetic polynucleotide"
  source 1..642: mol_type = other DNA

SEQ ID NO: 776 - DNA, 2031 bp, synthetic construct
  misc_feature 1..2031: note = source = /note="Description of Artificial Sequence: Synthetic polynucleotide"
  source 1..2031: mol_type = other DNA
caggtgcagctgcaggagtcgggcccaggactggtgaagccttcggagaccctgtccctcacctgcactgtctctggtggctccatcagtagttacttctggagctggatccggcagcccccaggtaagaaactggagtggattggctatatctattacagtgggcagaccaaatacaacccctccctcaagagtcgagtcaccatatcaatagacacgtccaagaaccagttctccctgaagctgagctctgtgaccgctgcggacacggccgtgtattactgtgcgagagaaactgggagctactacggctttgactactggggccagggaaccctggtcaccgtctcctcagcctccaccaagggcccatcggtcttccccctggcaccctcctccaagagcacctctgggggcacagcggccctgggctgcctggtcaaggactacttccccgaaccggtgacggtgtcgtggaactcaggcgccctgaccagcggcgtgcacaccttcccggctgtcctacagtcctcaggactctactccctcaaaagcgtggtgaccgtgccctccagcagcttgggcacccagacctacatctgcaacgtgaatcacaagcccagcaacaccaaggtggacaagaaagttgagcccaaatcttgtgacaaaactcacacatgcccaccgtgcccagcacctgaactcctggggggaccgtcagtcttcctcttccccccaaaacccaaggacaccctcatgatctcccggacccctgaggtcacatgcgtggtggtggacgtgagccacgaagaccctgaggtcaagttcaactggtacgtggacggcgtggaggtgcataatgccaagacaaagccgtgtgaggagcagtacggcagcacgtaccgttgtgtcagcgtcctcaccgtcctgcaccaggactggctgaatggcaaggagtacaagtgcaaggtctccaacaaagccctcccagcccccatcgagaaaaccatctccaaagccaaagggcagccccgagaaccacaggtgtacaccctgcccccatcccgggaggagatgaccaagaaccaggtcagcctgacctgcctggtcaaaggcttctatcccagcgacatcgccgtggagtgggagagcaatgggcagccggagaacaactacaagaccacgcctcccgtgctggactccgacggctccttcttcctctatagcaagctcaccgtggacaagagcaggtggcagcaggggaacgtcttctcatgctccgtgatgcatgaggctctgcacaaccactacacgcagaagagcctctccctgtctccgggtggtggcggatcgggaggtggcggatccgaggtgcagctggtgcagtctggagcagaggtgaaaaagcccggggagtctctgaagatctcctgtaagacttctgaatacagctttaccagctactggatcggctgggtgcgccagatgcccgggaaaggcctggagtggatggggatcatctatcttggtgactcagataccagatacagcccgtccttccaaggccaggtcaccatctcagccgacaagtccatcagtaccgcctacctgcagtggagcagcctgaaggcctcggacaccgccatgtattactgtgcgagaagtaactggggtcttgactactggggcaagggaaccctggtcaccgtctctagtcagcccaaggccaaccccactgtcactctgttcccgccctcctctgaggagctccaagccaacaaggccacactagtgtgtctgatcagtgacttctacccgggagctgtgacagtggcctggaaggcagatggcagccccgtcaaggcgggagtggagaccaccaaaccctccaaacagagcaacaacaagtacgcggccgagagctacctgagcctgacgcccgagcagtggaagtcccacagaagctacagctgccaggtcacgcatgaagggagcaccgtggagaagacagtggcccctacagaatgttca

SEQ ID NO: 777 - DNA, 645 bp, synthetic construct; identical to SEQ ID NO: 765
  misc_feature 1..645: note = source = /note="Description of Artificial Sequence: Synthetic polynucleotide"
  source 1..645: mol_type = other DNA

SEQ ID NO: 778 - protein, 214 aa, synthetic construct; identical to SEQ ID NO: 628
  REGION 1..214: note = source = /note="Description of Artificial Sequence: Synthetic polypeptide"

SEQ ID NO: 779 - protein, 677 aa, synthetic construct
  REGION 1..677: note = source = /note="Description of Artificial Sequence: Synthetic polypeptide"
QVQLQESGPGLVKPSETLSLTCTVSGGSISSYFWSWIRQPPGKKLEWIGYIYYSGQTKYNPSLKSRVTISIDTSKNQFSLKLSSVTAADTAVYYCARETGSYYGFDYWGQGTLVTVSSASTKGPSVFPLAPSSKSTSGGTAALGCLVKDYFPEPVTVSWNSGALTSGVHTFPAVLQSSGLYSLKSVVTVPSSSLGTQTYICNVNHKPSNTKVDKKVEPKSCDKTHTCPPCPAPELLGGPSVFLFPPKPKDTLMISRTPEVTCVVVDVSHEDPEVKFNWYVDGVEVHNAKTKPCEEQYGSTYRCVSVLTVLHQDWLNGKEYKCKVSNKALPAPIEKTISKAKGQPREPQVYTLPPSREEMTKNQVSLTCLVKGFYPSDIAVEWESNGQPENNYKTTPPVLDSDGSFFLYSKLTVDKSRWQQGNVFSCSVMHEALHNHYTQKSLSLSPGGGGSGGGGSEVQLVQSGAEVKKPGESLKISCKTSEYSFTSYWIGWVRQMPGKGLEWMGIIYLGDSDTRYSPSFQGQVTISADKSISTAYLQWSSLKASDTAMYYCARSNWGLDYWGKGTLVTVSSQPKANPTVTLFPPSSEELQANKATLVCLISDFYPGAVTVAWKADGSPVKAGVETTKPSKQSNNKYAAESYLSLTPEQWKSHRSYSCQVTHEGSTVEKTVAPTECS

SEQ ID NO: 780 - protein, 215 aa, synthetic construct; identical to SEQ ID NO: 768
  REGION 1..215: note = source = /note="Description of Artificial Sequence: Synthetic polypeptide"

SEQ ID NO: 781 - DNA, 660 bp, synthetic construct; identical to SEQ ID NO: 637
  misc_feature 1..660: note = source = /note="Description of Artificial Sequence: Synthetic polynucleotide"
  source 1..660: mol_type = other DNA

SEQ ID NO: 782 - DNA, 2070 bp, synthetic construct
  misc_feature 1..2070: note = source = /note="Description of Artificial Sequence: Synthetic polynucleotide"
  source 1..2070: mol_type = other DNA
caggtacagttgcaggagtcaggtccaggactggtgaagccctcggagaccctctcactcacctgtaccatctccggggacagtgtctctaccaacagtgttgcttggaactggatcaggcagcccccagggaaaaaacttgagtggataggaaggacatactacaggtccaagtggtataatgattatgcagtttctctgaaaagtcgagtaaccatcagcccagacacatccaagaaccagttctccctgaagctgagctctgtgactgccgcggacacggctgtgtattactgtgcaagagaggatggggatagctactaccgctacggtatggacgtctggggccaagggaccacggtcaccgtctcctcagcctccaccaagggcccatcggtcttccccctggcaccctcctccaagagcacctctgggggcacagcggccctgggctgcctggtcaaggactacttccccgaaccggtgacggtgtcgtggaactcaggcgccctgaccagcggcgtgcacaccttcccggctgtcctacagtcctcaggactctactccctcaaaagcgtggtgaccgtgccctccagcagcttgggcacccagacctacatctgcaacgtgaatcacaagcccagcaacaccaaggtggacaagaaagttgagcccaaatcttgtgacaaaactcacacatgcccaccgtgcccagcacctgaactcctggggggaccgtcagtcttcctcttccccccaaaacccaaggacaccctcatgatctcccggacccctgaggtcacatgcgtggtggtggacgtgagccacgaagaccctgaggtcaagttcaactggtacgtggacggcgtggaggtgcataatgccaagacaaagccgtgtgaggagcagtacggcagcacgtaccgttgtgtcagcgtcctcaccgtcctgcaccaggactggctgaatggcaaggagtacaagtgcaaggtctccaacaaagccctcccagcccccatcgagaaaaccatctccaaagccaaagggcagccccgagaaccacaggtgtacaccctgcccccatcccgggaggagatgaccaagaaccaggtcagcctgacctgcctggtcaaaggcttctatcccagcgacatcgccgtggagtgggagagcaatgggcagccggagaacaactacaagaccacgcctcccgtgctggactccgacggctccttcttcctctatagcaagctcaccgtggacaagagcaggtggcagcaggggaacgtcttctcatgctccgtgatgcatgaggctctgcacaaccactacacgcagaagagcctctccctgtctccgggtggtggcggatcgggaggtggcggatccgaggtacaactggtggaatcaggtggaggtttggtgcagccggggagatcgctcaggcttagctgtgcggcatcggggtttactttcgatgattatgcgatgcattgggtccggcaagcgcctggaaaagggctcgagtgggtttccgccattacgtggaatagcggacacatcgattatgcagacagtgtggagggcagattcacaatctcacgagacaatgctaagaacagcctgtaccttcagatgaactcacttcgcgcggaagataccgccgtatactactgcgccaaagtctcctacttgtctacagcttcgtcgctcgactattggggtaaaggaacgttggtcaccgtctctagtactgtggctgcaccatctgtcttcatcttcccgccatctgatgagcagttgaaatctggaactgcctctgttgtgtgcctgctgaataacttctatcccagagaggccaaagtacagtggaaggtggataacgccctccaatcgggtaactcccaggagagtgtcacagagcaggacagcaaggacagcacctacagcctcgaaagcaccctgacgctgagcaaagcagactacgagaaacacaaagtctacgcctgcgaagtcacccatcagggcctgagctcgcccgtcacaaagagcttcaacaggggagagtgt

SEQ ID NO: 783 - DNA, 633 bp, synthetic construct; identical to SEQ ID NO: 759
  misc_feature 1..633: note = source = /note="Description of Artificial Sequence: Synthetic polynucleotide"
  source 1..633: mol_type = other DNA

SEQ ID NO: 784 - protein, 220 aa, synthetic construct; identical to SEQ ID NO: 640
  REGION 1..220: note = source = /note="Description of Artificial Sequence: Synthetic polypeptide"

SEQ ID NO: 785 - protein, 690 aa, synthetic construct
  REGION 1..690: note = source = /note="Description of Artificial Sequence: Synthetic polypeptide"
QVQLQESGPGLVKPSETLSLTCTISGDSVSTNSVAWNWIRQPPGKKLEWIGRTYYRSKWYNDYAVSLKSRVTISPDTSKNQFSLKLSSVTAADTAVYYCAREDGDSYYRYGMDVWGQGTTVTVSSASTKGPSVFPLAPSSKSTSGGTAALGCLVKDYFPEPVTVSWNSGALTSGVHTFPAVLQSSGLYSLKSVVTVPSSSLGTQTYICNVNHKPSNTKVDKKVEPKSCDKTHTCPPCPAPELLGGPSVFLFPPKPKDTLMISRTPEVTCVVVDVSHEDPEVKFNWYVDGVEVHNAKTKPCEEQYGSTYRCVSVLTVLHQDWLNGKEYKCKVSNKALPAPIEKTISKAKGQPREPQVYTLPPSREEMTKNQVSLTCLVKGFYPSDIAVEWESNGQPENNYKTTPPVLDSDGSFFLYSKLTVDKSRWQQGNVFSCSVMHEALHNHYTQKSLSLSPGGGGSGGGGSEVQLVESGGGLVQPGRSLRLSCAASGFTFDDYAMHWVRQAPGKGLEWVSAITWNSGHIDYADSVEGRFTISRDNAKNSLYLQMNSLRAEDTAVYYCAKVSYLSTASSLDYWGKGTLVTVSSTVAAPSVFIFPPSDEQLKSGTASVVCLLNNFYPREAKVQWKVDNALQSGNSQESVTEQDSKDSTYSLESTLTLSKADYEKHKVYACEVTHQGLSSPVTKSFNRGEC

SEQ ID NO: 786 - protein, 211 aa, synthetic construct; identical to SEQ ID NO: 762
  REGION 1..211: note = source = /note="Description of Artificial Sequence: Synthetic polypeptide"

SEQ ID NO: 787 - DNA, 660 bp, synthetic construct; identical to SEQ ID NO: 637
  misc_feature 1..660: note = source = /note="Description of Artificial Sequence: Synthetic polynucleotide"
  source 1..660: mol_type = other DNA

SEQ ID NO: 788 - DNA, 2052 bp, synthetic construct
  misc_feature 1..2052: note = source = /note="Description of Artificial Sequence: Synthetic polynucleotide"
  source 1..2052: mol_type = other DNA
caggtacagttgcaggagtcaggtccaggactggtgaagccctcggagaccctctcactcacctgtaccatctccggggacagtgtctctaccaacagtgttgcttggaactggatcaggcagcccccagggaaaaaacttgagtggataggaaggacatactacaggtccaagtggtataatgattatgcagtttctctgaaaagtcgagtaaccatcagcccagacacatccaagaaccagttctccctgaagctgagctctgtgactgccgcggacacggctgtgtattactgtgcaagagaggatggggatagctactaccgctacggtatggacgtctggggccaagggaccacggtcaccgtctcctcagcctccaccaagggcccatcggtcttccccctggcaccctcctccaagagcacctctgggggcacagcggccctgggctgcctggtcaaggactacttccccgaaccggtgacggtgtcgtggaactcaggcgccctgaccagcggcgtgcacaccttcccggctgtcctacagtcctcaggactctactccctcaaaagcgtggtgaccgtgccctccagcagcttgggcacccagacctacatctgcaacgtgaatcacaagcccagcaacaccaaggtggacaagaaagttgagcccaaatcttgtgacaaaactcacacatgcccaccgtgcccagcacctgaactcctggggggaccgtcagtcttcctcttccccccaaaacccaaggacaccctcatgatctcccggacccctgaggtcacatgcgtggtggtggacgtgagccacgaagaccctgaggtcaagttcaactggtacgtggacggcgtggaggtgcataatgccaagacaaagccgtgtgaggagcagtacggcagcacgtaccgttgtgtcagcgtcctcaccgtcctgcaccaggactggctgaatggcaaggagtacaagtgcaaggtctccaacaaagccctcccagcccccatcgagaaaaccatctccaaagccaaagggcagccccgagaaccacaggtgtacaccctgcccccatcccgggaggagatgaccaagaaccaggtcagcctgacctgcctggtcaaaggcttctatcccagcgacatcgccgtggagtgggagagcaatgggcagccggagaacaactacaagaccacgcctcccgtgctggactccgacggctccttcttcctctatagcaagctcaccgtggacaagagcaggtggcagcaggggaacgtcttctcatgctccgtgatgcatgaggctctgcacaaccactacacgcagaagagcctctccctgtctccgggtggtggcggatcgggaggtggcggatccgaggtgcagctggtgcagtctggagcagaggtgaaaaagcccggggagtctctgaagatctcctgtaagacttctgaatacagctttaccagctactggatcggctgggtgcgccagatgcccgggaaaggcctggagtggatggggatcatctatcttggtgactcagataccagatacagcccgtccttccaaggccaggtcaccatctcagccgacaagtccatcagtaccgcctacctgcagtggagcagcctgaaggcctcggacaccgccatgtattactgtgcgagaagtaactggggtcttgactactggggcaagggaaccctggtcaccgtctctagtcagcccaaggccaaccccactgtcactctgttcccgccctcctctgaggagctccaagccaacaaggccacactagtgtgtctgatcagtgacttctacccgggagctgtgacagtggcctggaaggcagatggcagccccgtcaaggcgggagtggagaccaccaaaccctccaaacagagcaacaacaagtacgcggccgagagctacctgagcctgacgcccgagcagtggaagtcccacagaagctacagctgccaggtcacgcatgaagggagcaccgtggagaagacagtggcccctacagaatgttca

SEQ ID NO: 789 - DNA, 645 bp, synthetic construct; identical to SEQ ID NO: 765
  misc_feature 1..645: note = source = /note="Description of Artificial Sequence: Synthetic polynucleotide"
  source 1..645: mol_type = other DNA

SEQ ID NO: 790 - protein, 220 aa, synthetic construct; identical to SEQ ID NO: 640
  REGION 1..220: note = source = /note="Description of Artificial Sequence: Synthetic polypeptide"

SEQ ID NO: 791 - protein, 684 aa, synthetic construct
  REGION 1..684: note = source = /note="Description of Artificial Sequence: Synthetic polypeptide"
QVQLQESGPGLVKPSETLSLTCTISGDSVSTNSVAWNWIRQPPGKKLEWIGRTYYRSKWYNDYAVSLKSRVTISPDTSKNQFSLKLSSVTAADTAVYYCAREDGDSYYRYGMDVWGQGTTVTVSSASTKGPSVFPLAPSSKSTSGGTAALGCLVKDYFPEPVTVSWNSGALTSGVHTFPAVLQSSGLYSLKSVVTVPSSSLGTQTYICNVNHKPSNTKVDKKVEPKSCDKTHTCPPCPAPELLGGPSVFLFPPKPKDTLMISRTPEVTCVVVDVSHEDPEVKFNWYVDGVEVHNAKTKPCEEQYGSTYRCVSVLTVLHQDWLNGKEYKCKVSNKALPAPIEKTISKAKGQPREPQVYTLPPSREEMTKNQVSLTCLVKGFYPSDIAVEWESNGQPENNYKTTPPVLDSDGSFFLYSKLTVDKSRWQQGNVFSCSVMHEALHNHYTQKSLSLSPGGGGSGGGGSEVQLVQSGAEVKKPGESLKISCKTSEYSFTSYWIGWVRQMPGKGLEWMGIIYLGDSDTRYSPSFQGQVTISADKSISTAYLQWSSLKASDTAMYYCARSNWGLDYWGKGTLVTVSSQPKANPTVTLFPPSSEELQANKATLVCLISDFYPGAVTVAWKADGSPVKAGVETTKPSKQSNNKYAAESYLSLTPEQWKSHRSYSCQVTHEGSTVEKTVAPTECS

SEQ ID NO: 792 - protein, 215 aa, synthetic construct; identical to SEQ ID NO: 768
  REGION 1..215: note = source = /note="Description of Artificial Sequence: Synthetic polypeptide"

SEQ ID NO: 793 - DNA, 2064 bp, synthetic construct
  misc_feature 1..2064: note = source = /note="Description of Artificial Sequence: Synthetic polynucleotide"
  source 1..2064: mol_type = other DNA
gaggtacaactggtggaatcaggtggaggtttggtgcagccggggagatcgctcaggcttagctgtgcggcatcggggtttactttcgatgattatgcgatgcattgggtccggcaagcgcctggaaaaaagctcgagtgggtttccgccattacgtggaatagcggacacatcgattatgcagacagtgtggagggcagattcacaatctcacgagacaatgctaagaacagcctgtaccttcagatgaactcacttcgcgcggaagataccgccgtatactactgcgccaaagtctcctacttgtctacagcttcgtcgctcgactattggggtcaaggaacgttggtcaccgtctctagtacggtggctgcaccatctgtcttcatcttcccgccatctgatgagcagttgaaatctggaactgcctctgttgtgtgcctgctgaataacttctatcccagagaggccaaagtacagtggaaggtggataacgccctccaatcgggtaactcccaggagagtgtcacagagcaggacagcaaggacagcacctacagcctcaagagcaccctgacgctgagcaaagcagactacgagaaacacaaagtctacgcctgcgaagtcacccatcagggcctgagctcgcccgtcacaaagagcttcaacaggggagagtgtgacaaaactcacacatgcccaccgtgcccagcacctgaactcctggggggaccgtcagtcttcctcttccccccaaaacccaaggacaccctcatgatctcccggacccctgaggtcacatgcgtggtggtggacgtgagccacgaagaccctgaggtcaagttcaactggtacgtggacggcgtggaggtgcataatgccaagacaaagccgtgtgaggagcagtacggcagcacgtaccgttgtgtcagcgtcctcaccgtcctgcaccaggactggctgaatggcaaggagtacaagtgcaaggtctccaacaaagccctcccagcccccatcgagaaaaccatctccaaagccaaagggcagccccgagaaccacaggtgtacaccctgcccccatcccgggaggagatgaccaagaaccaggtcagcctgacctgcctggtcaaaggcttctatcccagcgacatcgccgtggagtgggagagcaatgggcagccggagaacaactacaagaccacgcctcccgtgctggactccgacggctccttcttcctctatagcaagctcaccgtggacaagagcaggtggcagcaggggaacgtcttctcatgctccgtgatgcatgaggctctgcacaaccactacacgcagaagagcctctccctgtctccgggtggtggcggatcgggaggtggcggatcccaggtgcagttacagcagtcgggcgcaggactgttgaagccttcggagaccctgtccctcacctgcgctgtccatggtgggtccttcagtggttactactggaactggattcgccagccaccagggaaggggctagagtggattggggaaatcaatcatgctggaaacaccaactacaacccgtccctcaagagtcgagtcaccatatcattagacacgtccaagaaccagttctccctgacgctgacctctgtgaccgccgcggacacggctgtgtattactgtgcgagaggatattgtagaagtaccacctgctactttgactactggggcaagggaaccctagtcaccgtctcctcaactgtggctgcaccatctgtcttcatcttcccgccatctgatgagcagttgaaatctggaactgcctctgttgtgtgcctgctgaataacttctatcccagagaggccaaagtacagtggaaggtggataacgccctccaatcgggtaactcccaggagagtgtcacagagcaggacagcaaggacagcacctacagcctcgaaagcaccctgacgctgagcaaagcagactacgagaaacacaaagtctacgcctgcgaagtcacccatcagggcctgagctcgcccgtcacaaagagcttcaacaggggagagtgt

SEQ ID NO: 794 - DNA, 633 bp, synthetic construct; identical to SEQ ID NO: 723
  misc_feature 1..633: note = source = /note="Description of Artificial Sequence: Synthetic polynucleotide"
  source 1..633: mol_type = other DNA

SEQ ID NO: 795 - DNA, 633 bp, synthetic construct; identical to SEQ ID NO: 651
  misc_feature 1..633: note = source = /note="Description of Artificial Sequence: Synthetic polynucleotide"
  source 1..633: mol_type = other DNA

SEQ ID NO: 796 - protein, 688 aa, synthetic construct
  REGION 1..688: note = source = /note="Description of Artificial Sequence: Synthetic polypeptide"
EVQLVESGGGLVQPGRSLRLSCAASGFTFDDYAMHWVRQAPGKKLEWVSAITWNSGHIDYADSVEGRFTISRDNAKNSLYLQMNSLRAEDTAVYYCAKVSYLSTASSLDYWGQGTLVTVSSTVAAPSVFIFPPSDEQLKSGTASVVCLLNNFYPREAKVQWKVDNALQSGNSQESVTEQDSKDSTYSLKSTLTLSKADYEKHKVYACEVTHQGLSSPVTKSFNRGECDKTHTCPPCPAPELLGGPSVFLFPPKPKDTLMISRTPEVTCVVVDVSHEDPEVKFNWYVDGVEVHNAKTKPCEEQYGSTYRCVSVLTVLHQDWLNGKEYKCKVSNKALPAPIEKTISKAKGQPREPQVYTLPPSREEMTKNQVSLTCLVKGFYPSDIAVEWESNGQPENNYKTTPPVLDSDGSFFLYSKLTVDKSRWQQGNVFSCSVMHEALHNHYTQKSLSLSPGGGGSGGGGSQVQLQQSGAGLLKPSETLSLTCAVHGGSFSGYYWNWIRQPPGKGLEWIGEINHAGNTNYNPSLKSRVTISLDTSKNQFSLTLTSVTAADTAVYYCARGYCRSTTCYFDYWGKGTLVTVSSTVAAPSVFIFPPSDEQLKSGTASVVCLLNNFYPREAKVQWKVDNALQSGNSQESVTEQDSKDSTYSLESTLTLSKADYEKHKVYACEVTHQGLSSPVTKSFNRGEC

SEQ ID NO: 797 - protein, 211 aa, synthetic construct; identical to SEQ ID NO: 726
  REGION 1..211: note = source = /note="Description of Artificial Sequence: Synthetic polypeptide"

SEQ ID NO: 798 - protein, 211 aa, synthetic construct; identical to SEQ ID NO: 654
  REGION 1..211: note = source = /note="Description of Artificial Sequence: Synthetic polypeptide"

SEQ ID NO: 799 - DNA, 2058 bp, synthetic construct
  misc_feature 1..2058: note = source = /note="Description of Artificial Sequence: Synthetic polynucleotide"
  source 1..2058: mol_type = other DNA
gaggtacaactggtggaatcaggtggaggtttggtgcagccggggagatcgctcaggcttagctgtgcggcatcggggtttactttcgatgattatgcgatgcattgggtccggcaagcgcctggaaaaaagctcgagtgggtttccgccattacgtggaatagcggacacatcgattatgcagacagtgtggagggcagattcacaatctcacgagacaatgctaagaacagcctgtaccttcagatgaactcacttcgcgcggaagataccgccgtatactactgcgccaaagtctcctacttgtctacagcttcgtcgctcgactattggggtcaaggaacgttggtcaccgtctctagtacggtggctgcaccatctgtcttcatcttcccgccatctgatgagcagttgaaatctggaactgcctctgttgtgtgcctgctgaataacttctatcccagagaggccaaagtacagtggaaggtggataacgccctccaatcgggtaactcccaggagagtgtcacagagcaggacagcaaggacagcacctacagcctcaagagcaccctgacgctgagcaaagcagactacgagaaacacaaagtctacgcctgcgaagtcacccatcagggcctgagctcgcccgtcacaaagagcttcaacaggggagagtgtgacaaaactcacacatgcccaccgtgcccagcacctgaactcctggggggaccgtcagtcttcctcttccccccaaaacccaaggacaccctcatgatctcccggacccctgaggtcacatgcgtggtggtggacgtgagccacgaagaccctgaggtcaagttcaactggtacgtggacggcgtggaggtgcataatgccaagacaaagccgtgtgaggagcagtacggcagcacgtaccgttgtgtcagcgtcctcaccgtcctgcaccaggactggctgaatggcaaggagtacaagtgcaaggtctccaacaaagccctcccagcccccatcgagaaaaccatctccaaagccaaagggcagccccgagaaccacaggtgtacaccctgcccccatcccgggaggagatgaccaagaaccaggtcagcctgacctgcctggtcaaaggcttctatcccagcgacatcgccgtggagtgggagagcaatgggcagccggagaacaactacaagaccacgcctcccgtgctggactccgacggctccttcttcctctatagcaagctcaccgtggacaagagcaggtggcagcaggggaacgtcttctcatgctccgtgatgcatgaggctctgcacaaccactacacgcagaagagcctctccctgtctccgggtggtggcggatcgggaggtggcggatcccaggtgcagctgcaggagtcgggcccaggactggtgaagccttcggagaccctgtccctcacctgcactgtctctggtggctccatcagtagttacttctggagctggattcggcagcccccaggtaagggactggagtggattggctatatctattacagtgggcagaccaaatacaacccctccctcaagagtcgagtcaccatatcaatagacacgtccaagaaccagttctccctgaagctgagctctgtgaccgctgcggacacggccgtgtattactgtgcgagagaaactgggagctactacggctttgactactggggcaagggaaccctggtcaccgtctcctcaactgtggctgcaccatctgtcttcatcttcccgccatctgatgagcagttgaaatctggaactgcctctgttgtgtgcctgctgaataacttctatcccagagaggccaaagtacagtggaaggtggataacgccctccaatcgggtaactcccaggagagtgtcacagagcaggacagcaaggacagcacctacagcctcgaaagcaccctgacgctgagcaaagcagactacgagaaacacaaagtctacgcctgcgaagtcacccatcagggcctgagctcgcccgtcacaaagagcttcaacaggggagagtgt

SEQ ID NO: 800 - DNA, 633 bp, synthetic construct; identical to SEQ ID NO: 729
  misc_feature 1..633: note = source = /note="Description of Artificial Sequence: Synthetic polynucleotide"
  source 1..633: mol_type = other DNA

SEQ ID NO: 801 - DNA, 633 bp, synthetic construct; identical to SEQ ID NO: 651
  misc_feature 1..633: note = source = /note="Description of Artificial Sequence: Synthetic polynucleotide"
  source 1..633: mol_type = other DNA

SEQ ID NO: 802 - protein, 686 aa, synthetic construct
  REGION 1..686: note = source = /note="Description of Artificial Sequence: Synthetic polypeptide"
EVQLVESGGGLVQPGRSLRLSCAASGFTFDDYAMHWVRQAPGKKLEWVSAITWNSGHIDYADSVEGRFTISRDNAKNSLYLQMNSLRAEDTAVYYCAKVSYLSTASSLDYWGQGTLVTVSSTVAAPSVFIFPPSDEQLKSGTASVVCLLNNFYPREAKVQWKVDNALQSGNSQESVTEQDSKDSTYSLKSTLTLSKADYEKHKVYACEVTHQGLSSPVTKSFNRGECDKTHTCPPCPAPELLGGPSVFLFPPKPKDTLMISRTPEVTCVVVDVSHEDPEVKFNWYVDGVEVHNAKTKPCEEQYGSTYRCVSVLTVLHQDWLNGKEYKCKVSNKALPAPIEKTISKAKGQPREPQVYTLPPSREEMTKNQVSLTCLVKGFYPSDIAVEWESNGQPENNYKTTPPVLDSDGSFFLYSKLTVDKSRWQQGNVFSCSVMHEALHNHYTQKSLSLSPGGGGSGGGGSQVQLQESGPGLVKPSETLSLTCTVSGGSISSYFWSWIRQPPGKGLEWIGYIYYSGQTKYNPSLKSRVTISIDTSKNQFSLKLSSVTAADTAVYYCARETGSYYGFDYWGKGTLVTVSSTVAAPSVFIFPPSDEQLKSGTASVVCLLNNFYPREAKVQWKVDNALQSGNSQESVTEQDSKDSTYSLESTLTLSKADYEKHKVYACEVTHQGLSSPVTKSFNRGEC

SEQ ID NO: 803 - protein, 211 aa, synthetic construct; identical to SEQ ID NO: 732
  REGION 1..211: note = source = /note="Description of Artificial Sequence: Synthetic polypeptide"

SEQ ID NO: 804 - protein, 211 aa, synthetic construct; identical to SEQ ID NO: 654
  REGION 1..211: note = source = /note="Description of Artificial Sequence: Synthetic polypeptide"

SEQ ID NO: 805 - DNA, 2079 bp, synthetic construct
  misc_feature 1..2079: note = source = /note="Description of Artificial Sequence: Synthetic polynucleotide"
  source 1..2079: mol_type = other DNA
gaggtacaactggtggaatcaggtggaggtttggtgcagccggggagatcgctcaggcttagctgtgcggcatcggggtttactttcgatgattatgcgatgcattgggtccggcaagcgcctggaaaaaagctcgagtgggtttccgccattacgtggaatagcggacacatcgattatgcagacagtgtggagggcagattcacaatctcacgagacaatgctaagaacagcctgtaccttcagatgaactcacttcgcgcggaagataccgccgtatactactgcgccaaagtctcctacttgtctacagcttcgtcgctcgactattggggtcaaggaacgttggtcaccgtctctagtacggtggctgcaccatctgtcttcatcttcccgccatctgatgagcagttgaaatctggaactgcctctgttgtgtgcctgctgaataacttctatcccagagaggccaaagtacagtggaaggtggataacgccctccaatcgggtaactcccaggagagtgtcacagagcaggacagcaaggacagcacctacagcctcaagagcaccctgacgctgagcaaagcagactacgagaaacacaaagtctacgcctgcgaagtcacccatcagggcctgagctcgcccgtcacaaagagcttcaacaggggagagtgtgacaaaactcacacatgcccaccgtgcccagcacctgaactcctggggggaccgtcagtcttcctcttccccccaaaacccaaggacaccctcatgatctcccggacccctgaggtcacatgcgtggtggtggacgtgagccacgaagaccctgaggtcaagttcaactggtacgtggacggcgtggaggtgcataatgccaagacaaagccgtgtgaggagcagtacggcagcacgtaccgttgtgtcagcgtcctcaccgtcctgcaccaggactggctgaatggcaaggagtacaagtgcaaggtctccaacaaagccctcccagcccccatcgagaaaaccatctccaaagccaaagggcagccccgagaaccacaggtgtacaccctgcccccatcccgggaggagatgaccaagaaccaggtcagcctgacctgcctggtcaaaggcttctatcccagcgacatcgccgtggagtgggagagcaatgggcagccggagaacaactacaagaccacgcctcccgtgctggactccgacggctccttcttcctctatagcaagctcaccgtggacaagagcaggtggcagcaggggaacgtcttctcatgctccgtgatgcatgaggctctgcacaaccactacacgcagaagagcctctccctgtctccgggtggtggcggatcgggaggtggcggatcccaggtacagttgcaggagtcaggtccaggactggtgaagccctcggagaccctctcactcacctgtaccatctccggggacagtgtctctaccaacagtgttgcttggaactggattaggcagcccccagggaaaggccttgagtggataggaaggacatactacaggtccaagtggtataatgattatgcagtttctctgaaaagtcgagtaaccatcagcccagacacatccaagaaccagttctccctgaagctgagctctgtgactgccgcggacacggctgtgtattactgtgcaagagaggatggggatagctactaccgctacggtatggacgtctggggcaaagggaccacggtcaccgtctcctcaactgtggctgcaccatctgtcttcatcttcccgccatctgatgagcagttgaaatctggaactgcctctgttgtgtgcctgctgaataacttctatcccagagaggccaaagtacagtggaaggtggataacgccctccaatcgggtaactcccaggagagtgtcacagagcaggacagcaaggacagcacctacagcctcgaaagcaccctgacgctgagcaaagcagactacgagaaacacaaagtctacgcctgcgaagtcacccatcagggcctgagctcgcccgtcacaaagagcttcaacaggggagagtgt

SEQ ID NO: 806 - DNA, 651 bp, synthetic construct; identical to SEQ ID NO: 735
  misc_feature 1..651: note = source = /note="Description of Artificial Sequence: Synthetic polynucleotide"
  source 1..651: mol_type = other DNA

SEQ ID NO: 807 - DNA, 633 bp, synthetic construct; identical to SEQ ID NO: 651
  misc_feature 1..633: note = source = /note="Description of Artificial Sequence: Synthetic polynucleotide"
  source 1..633: mol_type = other DNA

SEQ ID NO: 808 - protein, 693 aa, synthetic construct
  REGION 1..693: note = source = /note="Description of Artificial Sequence: Synthetic polypeptide"
EVQLVESGGGLVQPGRSLRLSCAASGFTFDDYAMHWVRQAPGKKLEWVSAITWNSGHIDYADSVEGRFTISRDNAKNSLYLQMNSLRAEDTAVYYCAKVSYLSTASSLDYWGQGTLVTVSSTVAAPSVFIFPPSDEQLKSGTASVVCLLNNFYPREAKVQWKVDNALQSGNSQESVTEQDSKDSTYSLKSTLTLSKADYEKHKVYACEVTHQGLSSPVTKSFNRGECDKTHTCPPCPAPELLGGPSVFLFPPKPKDTLMISRTPEVTCVVVDVSHEDPEVKFNWYVDGVEVHNAKTKPCEEQYGSTYRCVSVLTVLHQDWLNGKEYKCKVSNKALPAPIEKTISKAKGQPREPQVYTLPPSREEMTKNQVSLTCLVKGFYPSDIAVEWESNGQPENNYKTTPPVLDSDGSFFLYSKLTVDKSRWQQGNVFSCSVMHEALHNHYTQKSLSLSPGGGGSGGGGSQVQLQESGPGLVKPSETLSLTCTISGDSVSTNSVAWNWIRQPPGKGLEWIGRTYYRSKWYNDYAVSLKSRVTISPDTSKNQFSLKLSSVTAADTAVYYCAREDGDSYYRYGMDVWGKGTTVTVSSTVAAPSVFIFPPSDEQLKSGTASVVCLLNNFYPREAKVQWKVDNALQSGNSQESVTEQDSKDSTYSLESTLTLSKADYEKHKVYACEVTHQGLSSPVTKSFNRGEC

SEQ ID NO: 809 - protein, 217 aa, synthetic construct; identical to SEQ ID NO: 738
  REGION 1..217: note = source = /note="Description of Artificial Sequence: Synthetic polypeptide"

SEQ ID NO: 810 - protein, 211 aa, synthetic construct; identical to SEQ ID NO: 654
  REGION 1..211: note = source = /note="Description of Artificial Sequence: Synthetic polypeptide"

SEQ ID NO: 811 - DNA, 2046 bp, synthetic construct
  misc_feature 1..2046: note = source = /note="Description of Artificial Sequence: Synthetic polynucleotide"
  source 1..2046: mol_type = other DNA
gaggtgcagctggtgcagtctggagcagaggtgaaaaagcccggggagtctctgaagatctcctgtaagacttctgaatacagctttaccagctactggatcggctgggtgcgccagatgcccgggaaaaaactggagtggatggggatcatctatcttggtgactcagataccagatacagcccgtccttccaaggccaggtcaccatctcagccgacaagtccatcagtaccgcctacctgcagtggagcagcctgaaggcctcggacaccgccatgtattactgtgcgagaagtaactggggtcttgactactggggccagggaaccctggtcaccgtctctagtcagcccaaggccaaccccactgtcactctgttcccgccctcctctgaggagctccaagccaacaaggccacactagtgtgtctgatcagtgacttctacccgggagctgtgacagtggcctggaaggcagatggcagccccgtcaaggcgggagtggagaccaccaaaccctccaaacagagcaacaacaagtacgcggccaagagctacctgagcctgacgcccgagcagtggaagtcccacagaagctacagctgccaggtcacgcatgaagggagcaccgtggagaagacagtggcccctacagaatgttcagacaaaactcacacatgcccaccgtgcccagcacctgaactcctggggggaccgtcagtcttcctcttccccccaaaacccaaggacaccctcatgatctcccggacccctgaggtcacatgcgtggtggtggacgtgagccacgaagaccctgaggtcaagttcaactggtacgtggacggcgtggaggtgcataatgccaagacaaagccgtgtgaggagcagtacggcagcacgtaccgttgtgtcagcgtcctcaccgtcctgcaccaggactggctgaatggcaaggagtacaagtgcaaggtctccaacaaagccctcccagcccccatcgagaaaaccatctccaaagccaaagggcagccccgagaaccacaggtgtacaccctgcccccatcccgggaggagatgaccaagaaccaggtcagcctgacctgcctggtcaaaggcttctatcccagcgacatcgccgtggagtgggagagcaatgggcagccggagaacaactacaagaccacgcctcccgtgctggactccgacggctccttcttcctctatagcaagctcaccgtggacaagagcaggtggcagcaggggaacgtcttctcatgctccgtgatgcatgaggctctgcacaaccactacacgcagaagagcctctccctgtctccgggtggtggcggatcgggaggtggcggatcccaggtgcagttacagcagtcgggcgcaggactgttgaagccttcggagaccctgtccctcacctgcgctgtccatggtgggtccttcagtggttactactggaactggattcgccagccaccagggaaggggctagagtggattggggaaatcaatcatgctggaaacaccaactacaacccgtccctcaagagtcgagtcaccatatcattagacacgtccaagaaccagttctccctgacgctgacctctgtgaccgccgcggacacggctgtgtattactgtgcgagaggatattgtagaagtaccacctgctactttgactactggggcaagggaaccctagtcaccgtctcctcaactgtggctgcaccatctgtcttcatcttcccgccatctgatgagcagttgaaatctggaactgcctctgttgtgtgcctgctgaataacttctatcccagagaggccaaagtacagtggaaggtggataacgccctccaatcgggtaactcccaggagagtgtcacagagcaggacagcaaggacagcacctacagcctcgaaagcaccctgacgctgagcaaagcagactacgagaaacacaaagtctacgcctgcgaagtcacccatcagggcctgagctcgcccgtcacaaagagcttcaacaggggagagtgt

SEQ ID NO: 812 - DNA, 633 bp, synthetic construct; identical to SEQ ID NO: 723
  misc_feature 1..633: note = source = /note="Description of Artificial Sequence: Synthetic polynucleotide"
  source 1..633: mol_type = other DNA

SEQ ID NO: 813 - DNA, 645 bp, synthetic construct; identical to SEQ ID NO: 669
  misc_feature 1..645: note = source = /note="Description of Artificial Sequence: Synthetic polynucleotide"
  source 1..645: mol_type = other DNA

SEQ ID NO: 814 - protein, 682 aa, synthetic construct
  REGION 1..682: note = source = /note="Description of Artificial Sequence: Synthetic polypeptide"
EVQLVQSGAEVKKPGESLKISCKTSEYSFTSYWIGWVRQMPGKKLEWMGIIYLGDSDTRYSPSFQGQVTISADKSISTAYLQWSSLKASDTAMYYCARSNWGLDYWGQGTLVTVSSQPKANPTVTLFPPSSEELQANKATLVCLISDFYPGAVTVAWKADGSPVKAGVETTKPSKQSNNKYAAKSYLSLTPEQWKSHRSYSCQVTHEGSTVEKTVAPTECSDKTHTCPPCPAPELLGGPSVFLFPPKPKDTLMISRTPEVTCVVVDVSHEDPEVKFNWYVDGVEVHNAKTKPCEEQYGSTYRCVSVLTVLHQDWLNGKEYKCKVSNKALPAPIEKTISKAKGQPREPQVYTLPPSREEMTKNQVSLTCLVKGFYPSDIAVEWESNGQPENNYKTTPPVLDSDGSFFLYSKLTVDKSRWQQGNVFSCSVMHEALHNHYTQKSLSLSPGGGGSGGGGSQVQLQQSGAGLLKPSETLSLTCAVHGGSFSGYYWNWIRQPPGKGLEWIGEINHAGNTNYNPSLKSRVTISLDTSKNQFSLTLTSVTAADTAVYYCARGYCRSTTCYFDYWGKGTLVTVSSTVAAPSVFIFPPSDEQLKSGTASVVCLLNNFYPREAKVQWKVDNALQSGNSQESVTEQDSKDSTYSLESTLTLSKADYEKHKVYACEVTHQGLSSPVTKSFNRGEC

SEQ ID NO: 815 - protein, 211 aa, synthetic construct; identical to SEQ ID NO: 726
  REGION 1..211: note = source = /note="Description of Artificial Sequence: Synthetic polypeptide"

SEQ ID NO: 816 - protein, 215 aa, synthetic construct; identical to SEQ ID NO: 672
  REGION 1..215: note = source = /note="Description of Artificial Sequence: Synthetic polypeptide"

SEQ ID NO: 817 - DNA, 2040 bp, synthetic construct
  misc_feature 1..2040: note = source = /note="Description of Artificial Sequence: Synthetic polynucleotide"
  source 1..2040: mol_type = other DNA
gaggtgcagctggtgcagtctggagcagaggtgaaaaagcccggggagtctctgaagatctcctgtaagacttctgaatacagctttaccagctactggatcggctgggtgcgccagatgcccgggaaaaaactggagtggatggggatcatctatcttggtgactcagataccagatacagcccgtccttccaaggccaggtcaccatctcagccgacaagtccatcagtaccgcctacctgcagtggagcagcctgaaggcctcggacaccgccatgtattactgtgcgagaagtaactggggtcttgactactggggccagggaaccctggtcaccgtctctagtcagcccaaggccaaccccactgtcactctgttcccgccctcctctgaggagctccaagccaacaaggccacactagtgtgtctgatcagtgacttctacccgggagctgtgacagtggcctggaaggcagatggcagccccgtcaaggcgggagtggagaccaccaaaccctccaaacagagcaacaacaagtacgcggccaagagctacctgagcctgacgcccgagcagtggaagtcccacagaagctacagctgccaggtcacgcatgaagggagcaccgtggagaagacagtggcccctacagaatgttcagacaaaactcacacatgcccaccgtgcccagcacctgaactcctggggggaccgtcagtcttcctcttccccccaaaacccaaggacaccctcatgatctcccggacccctgaggtcacatgcgtggtggtggacgtgagccacgaagaccctgaggtcaagttcaactggtacgtggacggcgtggaggtgcataatgccaagacaaagccgtgtgaggagcagtacggcagcacgtaccgttgtgtcagcgtcctcaccgtcctgcaccaggactggctgaatggcaaggagtacaagtgcaaggtctccaacaaagccctcccagcccccatcgagaaaaccatctccaaagccaaagggcagccccgagaaccacaggtgtacaccctgcccccatcccgggaggagatgaccaagaaccaggtcagcctgacctgcctggtcaaaggcttctatcccagcgacatcgccgtggagtgggagagcaatgggcagccggagaacaactacaagaccacgcctcccgtgctggactccgacggctccttcttcctctatagcaagctcaccgtggacaagagcaggtggcagcaggggaacgtcttctcatgctccgtgatgcatgaggctctgcacaaccactacacgcagaagagcctctccctgtctccgggtggtggcggatcgggaggtggcggatcccaggtgcagctgcaggagtcgggcccaggactggtgaagccttcggagaccctgtccctcacctgcactgtctctggtggctccatcagtagttacttctggagctggattcggcagcccccaggtaagggactggagtggattggctatatctattacagtgggcagaccaaatacaacccctccctcaagagtcgagtcaccatatcaatagacacgtccaagaaccagttctccctgaagctgagctctgtgaccgctgcggacacggccgtgtattactgtgcgagagaaactgggagctactacggctttgactactggggcaagggaaccctggtcaccgtctcctcaactgtggctgcaccatctgtcttcatcttcccgccatctgatgagcagttgaaatctggaactgcctctgttgtgtgcctgctgaataacttctatcccagagaggccaaagtacagtggaaggtggataacgccctccaatcgggtaactcccaggagagtgtcacagagcaggacagcaaggacagcacctacagcctcgaaagcaccctgacgctgagcaaagcagactacgagaaacacaaagtctacgcctgcgaagtcacccatcagggcctgagctcgcccgtcacaaagagcttcaacaggggagagtgt

SEQ ID NO: 818 - DNA, 633 bp, synthetic construct; identical to SEQ ID NO: 729
  misc_feature 1..633: note = source = /note="Description of Artificial Sequence: Synthetic polynucleotide"
  source 1..633: mol_type = other DNA

SEQ ID NO: 819 - DNA, 645 bp, synthetic construct; identical to SEQ ID NO: 669
  misc_feature 1..645: note = source = /note="Description of Artificial Sequence: Synthetic polynucleotide"
  source 1..645: mol_type = other DNA

SEQ ID NO: 820 - protein, 680 aa, synthetic construct
  REGION 1..680: note = source = /note="Description of Artificial Sequence: Synthetic polypeptide"
EVQLVQSGAEVKKPGESLKISCKTSEYSFTSYWIGWVRQMPGKKLEWMGIIYLGDSDTRYSPSFQGQVTISADKSISTAYLQWSSLKASDTAMYYCARSNWGLDYWGQGTLVTVSSQPKANPTVTLFPPSSEELQANKATLVCLISDFYPGAVTVAWKADGSPVKAGVETTKPSKQSNNKYAAKSYLSLTPEQWKSHRSYSCQVTHEGSTVEKTVAPTECSDKTHTCPPCPAPELLGGPSVFLFPPKPKDTLMISRTPEVTCVVVDVSHEDPEVKFNWYVDGVEVHNAKTKPCEEQYGSTYRCVSVLTVLHQDWLNGKEYKCKVSNKALPAPIEKTISKAKGQPREPQVYTLPPSREEMTKNQVSLTCLVKGFYPSDIAVEWESNGQPENNYKTTPPVLDSDGSFFLYSKLTVDKSRWQQGNVFSCSVMHEALHNHYTQKSLSLSPGGGGSGGGGSQVQLQESGPGLVKPSETLSLTCTVSGGSISSYFWSWIRQPPGKGLEWIGYIYYSGQTKYNPSLKSRVTISIDTSKNQFSLKLSSVTAADTAVYYCARETGSYYGFDYWGKGTLVTVSSTVAAPSVFIFPPSDEQLKSGTASVVCLLNNFYPREAKVQWKVDNALQSGNSQESVTEQDSKDSTYSLESTLTLSKADYEKHKVYACEVTHQGLSSPVTKSFNRGEC

SEQ ID NO: 821 - protein, 211 aa, synthetic construct; identical to SEQ ID NO: 732
  REGION 1..211: note = source = /note="Description of Artificial Sequence: Synthetic polypeptide"

SEQ ID NO: 822 - protein, 215 aa, synthetic construct; identical to SEQ ID NO: 672
  REGION 1..215: note = source = /note="Description of Artificial Sequence: Synthetic polypeptide"

SEQ ID NO: 823 - DNA, 2061 bp, synthetic construct
  misc_feature 1..2061: note = source = /note="Description of Artificial Sequence: Synthetic polynucleotide"
  source 1..2061: mol_type = other DNA
gaggtgcagctggtgcagtctggagcagaggtgaaaaagcccggggagtctctgaagatctcctgtaagacttctgaatacagctttaccagctactggatcggctgggtgcgccagatgcccgggaaaaaactggagtggatggggatcatctatcttggtgactcagataccagatacagcccgtccttccaaggccaggtcaccatctcagccgacaagtccatcagtaccgcctacctgcagtggagcagcctgaaggcctcggacaccgccatgtattactgtgcgagaagtaactggggtcttgactactggggccagggaaccctggtcaccgtctctagtcagcccaaggccaaccccactgtcactctgttcccgccctcctctgaggagctccaagccaacaaggccacactagtgtgtctgatcagtgacttctacccgggagctgtgacagtggcctggaaggcagatggcagccccgtcaaggcgggagtggagaccaccaaaccctccaaacagagcaacaacaagtacgcggccaagagctacctgagcctgacgcccgagcagtggaagtcccacagaagctacagctgccaggtcacgcatgaagggagcaccgtggagaagacagtggcccctacagaatgttcagacaaaactcacacatgcccaccgtgcccagcacctgaactcctggggggaccgtcagtcttcctcttccccccaaaacccaaggacaccctcatgatctcccggacccctgaggtcacatgcgtggtggtggacgtgagccacgaagaccctgaggtcaagttcaactggtacgtggacggcgtggaggtgcataatgccaagacaaagccgtgtgaggagcagtacggcagcacgtaccgttgtgtcagcgtcctcaccgtcctgcaccaggactggctgaatggcaaggagtacaagtgcaaggtctccaacaaagccctcccagcccccatcgagaaaaccatctccaaagccaaagggcagccccgagaaccacaggtgtacaccctgcccccatcccgggaggagatgaccaagaaccaggtcagcctgacctgcctggtcaaaggcttctatcccagcgacatcgccgtggagtgggagagcaatgggcagccggagaacaactacaagaccacgcctcccgtgctggactccgacggctccttcttcctctatagcaagctcaccgtggacaagagcaggtggcagcaggggaacgtcttctcatgctccgtgatgcatgaggctctgcacaaccactacacgcagaagagcctctccctgtctccgggtggtggcggatcgggaggtggcggatcccaggtacagttgcaggagtcaggtccaggactggtgaagccctcggagaccctctcactcacctgtaccatctccggggacagtgtctctaccaacagtgttgcttggaactggattaggcagcccccagggaaaggccttgagtggataggaaggacatactacaggtccaagtggtataatgattatgcagtttctctgaaaagtcgagtaaccatcagcccagacacatccaagaaccagttctccctgaagctgagctctgtgactgccgcggacacggctgtgtattactgtgcaagagaggatggggatagctactaccgctacggtatggacgtctggggcaaagggaccacggtcaccgtctcctcaactgtggctgcaccatctgtcttcatcttcccgccatctgatgagcagttgaaatctggaactgcctctgttgtgtgcctgctgaataacttctatcccagagaggccaaagtacagtggaaggtggataacgccctccaatcgggtaactcccaggagagtgtcacagagcaggacagcaaggacagcacctacagcctcgaaagcaccctgacgctgagcaaagcagactacgagaaacacaaagtctacgcctgcgaagtcacccatcagggcctgagctcgcccgtcacaaagagcttcaacaggggagagtgt

SEQ ID NO: 824 - DNA, 651 bp, synthetic construct; identical to SEQ ID NO: 735
  misc_feature 1..651: note = source = /note="Description of Artificial Sequence: Synthetic polynucleotide"
  source 1..651: mol_type = other DNA

SEQ ID NO: 825 - DNA, 645 bp, synthetic construct; identical to SEQ ID NO: 669
  misc_feature 1..645: note = source = /note="Description of Artificial Sequence: Synthetic polynucleotide"
  source 1..645: mol_type = other DNA

SEQ ID NO: 826 - protein, 687 aa, synthetic construct
  REGION 1..687: note = source = /note="Description of Artificial Sequence: Synthetic polypeptide"
EVQLVQSGAEVKKPGESLKISCKTSEYSFTSYWIGWVRQMPGKKLEWMGIIYLGDSDTRYSPSFQGQVTISADKSISTAYLQWSSLKASDTAMYYCARSNWGLDYWGQGTLVTVSSQPKANPTVTLFPPSSEELQANKATLVCLISDFYPGAVTVAWKADGSPVKAGVETTKPSKQSNNKYAAKSYLSLTPEQWKSHRSYSCQVTHEGSTVEKTVAPTECSDKTHTCPPCPAPELLGGPSVFLFPPKPKDTLMISRTPEVTCVVVDVSHEDPEVKFNWYVDGVEVHNAKTKPCEEQYGSTYRCVSVLTVLHQDWLNGKEYKCKVSNKALPAPIEKTISKAKGQPREPQVYTLPPSREEMTKNQVSLTCLVKGFYPSDIAVEWESNGQPENNYKTTPPVLDSDGSFFLYSKLTVDKSRWQQGNVFSCSVMHEALHNHYTQKSLSLSPGGGGSGGGGSQVQLQESGPGLVKPSETLSLTCTISGDSVSTNSVAWNWIRQPPGKGLEWIGRTYYRSKWYNDYAVSLKSRVTISPDTSKNQFSLKLSSVTAADTAVYYCAREDGDSYYRYGMDVWGKGTTVTVSSTVAAPSVFIFPPSDEQLKSGTASVVCLLNNFYPREAKVQWKVDNALQSGNSQESVTEQDSKDSTYSLESTLTLSKADYEKHKVYACEVTHQGLSSPVTKSFNRGEC

SEQ ID NO: 827 - protein, 217 aa, synthetic construct; identical to SEQ ID NO: 738
  REGION 1..217: note = source = /note="Description of Artificial Sequence: Synthetic polypeptide"

SEQ ID NO: 828 - protein, 215 aa, synthetic construct; identical to SEQ ID NO: 672
  REGION 1..215: note = source = /note="Description of Artificial Sequence: Synthetic polypeptide"

SEQ ID NO: 829 - DNA, 2064 bp, synthetic construct
  misc_feature 1..2064: note = source = /note="Description of Artificial Sequence: Synthetic polynucleotide"
  source 1..2064: mol_type = other DNA
caggtgcagttacagcagtcgggcgcaggactgttgaagccttcggagaccctgtccctcacctgcgctgtccatggtgggtccttcagtggttactactggaactggattcgccagccaccagggaagaagctagagtggattggggaaatcaatcatgctggaaacaccaactacaacccgtccctcaagagtcgagtcaccatatcattagacacgtccaagaaccagttctccctgacgctgacctctgtgaccgccgcggacacggctgtgtattactgtgcgagaggatattgtagaagtaccacctgctactttgactactggggccagggaaccctagtcaccgtctcctcaacggtggctgcaccatctgtcttcatcttcccgccatctgatgagcagttgaaatctggaactgcctctgttgtgtgcctgctgaataacttctatcccagagaggccaaagtacagtggaaggtggataacgccctccaatcgggtaactcccaggagagtgtcacagagcaggacagcaaggacagcacctacagcctcaagagcaccctgacgctgagcaaagcagactacgagaaacacaaagtctacgcctgcgaagtcacccatcagggcctgagctcgcccgtcacaaagagcttcaacaggggagagtgtgacaaaactcacacatgcccaccgtgcccagcacctgaactcctggggggaccgtcagtcttcctcttccccccaaaacccaaggacaccctcatgatctcccggacccctgaggtcacatgcgtggtggtggacgtgagccacgaagaccctgaggtcaagttcaactggtacgtggacggcgtggaggtgcataatgccaagacaaagccgtgtgaggagcagtacggcagcacgtaccgttgtgtcagcgtcctcaccgtcctgcaccaggactggctgaatggcaaggagtacaagtgcaaggtctccaacaaagccctcccagcccccatcgagaaaaccatctccaaagccaaagggcagccccgagaaccacaggtgtacaccctgcccccatcccgggaggagatgaccaagaaccaggtcagcctgacctgcctggtcaaaggcttctatcccagcgacatcgccgtggagtgggagagcaatgggcagccggagaacaactacaagaccacgcctcccgtgctggactccgacggctccttcttcctctatagcaagctcaccgtggacaagagcaggtggcagcaggggaacgtcttctcatgctccgtgatgcatgaggctctgcacaaccactacacgcagaagagcctctccctgtctccgggtggtggcggatcgggaggtggcggatccgaggtacaactggtggaatcaggtggaggtttggtgcagccggggagatcgctcaggcttagctgtgcggcatcggggtttactttcgatgattatgcgatgcattgggtccggcaagcgcctggaaaagggctcgagtgggtttccgccattacgtggaatagcggacacatcgattatgcagacagtgtggagggcagattcacaatctcacgagacaatgctaagaacagcctgtaccttcagatgaactcacttcgcgcggaagataccgccgtatactactgcgccaaagtctcctacttgtctacagcttcgtcgctcgactattggggtaaaggaacgttggtcaccgtctctagtactgtggctgcaccatctgtcttcatcttcccgccatctgatgagcagttgaaatctggaactgcctctgttgtgtgcctgctgaataacttctatcccagagaggccaaagtacagtggaaggtggataacgccctccaatcgggtaactcccaggagagtgtcacagagcaggacagcaaggacagcacctacagcctcgaaagcaccctgacgctgagcaaagcagactacgagaaacacaaagtctacgcctgcgaagtcacccatcagggcctgagctcgcccgtcacaaagagcttcaacaggggagagtgt

SEQ ID NO: 830 - DNA, 633 bp, synthetic construct; identical to SEQ ID NO: 759
  misc_feature 1..633: note = source = /note="Description of Artificial Sequence: Synthetic polynucleotide"
  source 1..633: mol_type = other DNA

SEQ ID NO: 831 - DNA, 633 bp, synthetic construct; identical to SEQ ID NO: 687
  misc_feature 1..633: note = source = /note="Description of Artificial Sequence: Synthetic polynucleotide"
  source 1..633: mol_type = other DNA

SEQ ID NO: 832 - protein, 688 aa, synthetic construct
  REGION 1..688: note = source = /note="Description of Artificial Sequence: Synthetic polypeptide"
QVQLQQSGAGLLKPSETLSLTCAVHGGSFSGYYWNWIRQPPGKKLEWIGEINHAGNTNYNPSLKSRVTISLDTSKNQFSLTLTSVTAADTAVYYCARGYCRSTTCYFDYWGQGTLVTVSSTVAAPSVFIFPPSDEQLKSGTASVVCLLNNFYPREAKVQWKVDNALQSGNSQESVTEQDSKDSTYSLKSTLTLSKADYEKHKVYACEVTHQGLSSPVTKSFNRGECDKTHTCPPCPAPELLGGPSVFLFPPKPKDTLMISRTPEVTCVVVDVSHEDPEVKFNWYVDGVEVHNAKTKPCEEQYGSTYRCVSVLTVLHQDWLNGKEYKCKVSNKALPAPIEKTISKAKGQPREPQVYTLPPSREEMTKNQVSLTCLVKGFYPSDIAVEWESNGQPENNYKTTPPVLDSDGSFFLYSKLTVDKSRWQQGNVFSCSVMHEALHNHYTQKSLSLSPGGGGSGGGGSEVQLVESGGGLVQPGRSLRLSCAASGFTFDDYAMHWVRQAPGKGLEWVSAITWNSGHIDYADSVEGRFTISRDNAKNSLYLQMNSLRAEDTAVYYCAKVSYLSTASSLDYWGKGTLVTVSSTVAAPSVFIFPPSDEQLKSGTASVVCLLNNFYPREAKVQWKVDNALQSGNSQESVTEQDSKDSTYSLESTLTLSKADYEKHKVYACEVTHQGLSSPVTKSFNRGEC

SEQ ID NO: 833 - protein, 211 aa, synthetic construct; identical to SEQ ID NO: 762
  REGION 1..211: note = source = /note="Description of Artificial Sequence: Synthetic polypeptide"

SEQ ID NO: 834 - protein, 211 aa, synthetic construct; identical to SEQ ID NO: 690
  REGION 1..211: note = source = /note="Description of Artificial Sequence: Synthetic polypeptide"

SEQ ID NO: 835 - DNA, 2046 bp, synthetic construct
  misc_feature 1..2046: note = source = /note="Description of Artificial Sequence: Synthetic polynucleotide"
  source 1..2046: mol_type = other DNA
caggtgcagttacagcagtcgggcgcaggactgttgaagccttcggagaccctgtccctcacctgcgctgtccatggtgggtccttcagtggttactactggaactggattcgccagccaccagggaagaagctagagtggattggggaaatcaatcatgctggaaacaccaactacaacccgtccctcaagagtcgagtcaccatatcattagacacgtccaagaaccagttctccctgacgctgacctctgtgaccgccgcggacacggctgtgtattactgtgcgagaggatattgtagaagtaccacctgctactttgactactggggccagggaaccctagtcaccgtctcctcaacggtggctgcaccatctgtcttcatcttcccgccatctgatgagcagttgaaatctggaactgcctctgttgtgtgcctgctgaataacttctatcccagagaggccaaagtacagtggaaggtggataacgccctccaatcgggtaactcccaggagagtgtcacagagcaggacagcaaggacagcacctacagcctcaagagcaccctgacgctgagcaaagcagactacgagaaacacaaagtctacgcctgcgaagtcacccatcagggcctgagctcgcccgtcacaaagagcttcaacaggggagagtgtgacaaaactcacacatgcccaccgtgcccagcacctgaactcctggggggaccgtcagtcttcctcttccccccaaaacccaaggacaccctcatgatctcccggacccctgaggtcacatgcgtggtggtggacgtgagccacgaagaccctgaggtcaagttcaactggtacgtggacggcgtggaggtgcataatgccaagacaaagccgtgtgaggagcagtacggcagcacgtaccgttgtgtcagcgtcctcaccgtcctgcaccaggactggctgaatggcaaggagtacaagtgcaaggtctccaacaaagccctcccagcccccatcgagaaaaccatctccaaagccaaagggcagccccgagaaccacaggtgtacaccctgcccccatcccgggaggagatgaccaagaaccaggtcagcctgacctgcctggtcaaaggcttctatcccagcgacatcgccgtggagtgggagagcaatgggcagccggagaacaactacaagaccacgcctcccgtgctggactccgacggctccttcttcctctatagcaagctcaccgtggacaagagcaggtggcagcaggggaacgtcttctcatgctccgtgatgcatgaggctctgcacaaccactacacgcagaagagcctctccctgtctccgggtggtggcggatcgggaggtggcggatccgaggtgcagctggtgcagtctggagcagaggtgaaaaagcccggggagtctctgaagatctcctgtaagacttctgaatacagctttaccagctactggatcggctgggtgcgccagatgcccgggaaaggcctggagtggatggggatcatctatcttggtgactcagataccagatacagcccgtccttccaaggccaggtcaccatctcagccgacaagtccatcagtaccgcctacctgcagtggagcagcctgaaggcctcggacaccgccatgtattactgtgcgagaagtaactggggtcttgactactggggcaagggaaccctggtcaccgtctctagtcagcccaaggccaaccccactgtcactctgttcccgccctcctctgaggagctccaagccaacaaggccacactagtgtgtctgatcagtgacttctacccgggagctgtgacagtggcctggaaggcagatggcagccccgtcaaggcgggagtggagaccaccaaaccctccaaacagagcaacaacaagtacgcggccgagagctacctgagcctgacgcccgagcagtggaagtcccacagaagctacagctgccaggtcacgcatgaagggagcaccgtggagaagacagtggcccctacagaatgttca

SEQ ID NO: 836 - DNA, 645 bp, synthetic construct; identical to SEQ ID NO: 765
  misc_feature 1..645: note = source = /note="Description of Artificial Sequence: Synthetic polynucleotide"
  source 1..645: mol_type = other DNA

SEQ ID NO: 837 - DNA, 633 bp, synthetic construct; identical to SEQ ID NO: 687
  misc_feature 1..633: note = source = /note="Description of Artificial Sequence: Synthetic polynucleotide"
  source 1..633: mol_type = other DNA

SEQ ID NO: 838 - protein, 682 aa, synthetic construct
  REGION 1..682: note = source = /note="Description of Artificial Sequence: Synthetic polypeptide"
QVQLQQSGAGLLKPSETLSLTCAVHGGSFSGYYWNWIRQPPGKKLEWIGEINHAGNTNYNPSLKSRVTISLDTSKNQFSLTLTSVTAADTAVYYCARGYCRSTTCYFDYWGQGTLVTVSSTVAAPSVFIFPPSDEQLKSGTASVVCLLNNFYPREAKVQWKVDNALQSGNSQESVTEQDSKDSTYSLKSTLTLSKADYEKHKVYACEVTHQGLSSPVTKSFNRGECDKTHTCPPCPAPELLGGPSVFLFPPKPKDTLMISRTPEVTCVVVDVSHEDPEVKFNWYVDGVEVHNAKTKPCEEQYGSTYRCVSVLTVLHQDWLNGKEYKCKVSNKALPAPIEKTISKAKGQPREPQVYTLPPSREEMTKNQVSLTCLVKGFYPSDIAVEWESNGQPENNYKTTPPVLDSDGSFFLYSKLTVDKSRWQQGNVFSCSVMHEALHNHYTQKSLSLSPGGGGSGGGGSEVQLVQSGAEVKKPGESLKISCKTSEYSFTSYWIGWVRQMPGKGLEWMGIIYLGDSDTRYSPSFQGQVTISADKSISTAYLQWSSLKASDTAMYYCARSNWGLDYWGKGTLVTVSSQPKANPTVTLFPPSSEELQANKATLVCLISDFYPGAVTVAWKADGSPVKAGVETTKPSKQSNNKYAAESYLSLTPEQWKSHRSYSCQVTHEGSTVEKTVAPTECS

SEQ ID NO: 839 - protein, 215 aa, synthetic construct; identical to SEQ ID NO: 768
  REGION 1..215: note = source = /note="Description of Artificial Sequence: Synthetic polypeptide"

SEQ ID NO: 840 - protein, 211 aa, synthetic construct; identical to SEQ ID NO: 690
  REGION 1..211: note = source = /note="Description of Artificial Sequence: Synthetic polypeptide"

SEQ ID NO: 841 - DNA, 2058 bp, synthetic construct
  misc_feature 1..2058: note = source = /note="Description of Artificial Sequence: Synthetic polynucleotide"
  source 1..2058: mol_type = other DNA
caggtgcagctgcaggagtcgggcccaggactggtgaagccttcggagaccctgtccctcacctgcactgtctctggtggctccatcagtagttacttctggagctggattcggcagcccccaggtaagaaactggagtggattggctatatctattacagtgggcagaccaaatacaacccctccctcaagagtcgagtcaccatatcaatagacacgtccaagaaccagttctccctgaagctgagctctgtgaccgctgcggacacggccgtgtattactgtgcgagagaaactgggagctactacggctttgactactggggccagggaaccctggtcaccgtctcctcaacggtggctgcaccatctgtcttcatcttcccgccatctgatgagcagttgaaatctggaactgcctctgttgtgtgcctgctgaataacttctatcccagagaggccaaagtacagtggaaggtggataacgccctccaatcgggtaactcccaggagagtgtcacagagcaggacagcaaggacagcacctacagcctcaagagcaccctgacgctgagcaaagcagactacgagaaacacaaagtctacgcctgcgaagtcacccatcagggcctgagctcgcccgtcacaaagagcttcaacaggggagagtgtgacaaaactcacacatgcccaccgtgcccagcacctgaactcctggggggaccgtcagtcttcctcttccccccaaaacccaaggacaccctcatgatctcccggacccctgaggtcacatgcgtggtggtggacgtgagccacgaagaccctgaggtcaagttcaactggtacgtggacggcgtggaggtgcataatgccaagacaaagccgtgtgaggagcagtacggcagcacgtaccgttgtgtcagcgtcctcaccgtcctgcaccaggactggctgaatggcaaggagtacaagtgcaaggtctccaacaaagccctcccagcccccatcgagaaaaccatctccaaagccaaagggcagccccgagaaccacaggtgtacaccctgcccccatcccgggaggagatgaccaagaaccaggtcagcctgacctgcctggtcaaaggcttctatcccagcgacatcgccgtggagtgggagagcaatgggcagccggagaacaactacaagaccacgcctcccgtgctggactccgacggctccttcttcctctatagcaagctcaccgtggacaagagcaggtggcagcaggggaacgtcttctcatgctccgtgatgcatgaggctctgcacaaccactacacgcagaagagcctctccctgtctccgggtggtggcggatcgggaggtggcggatccgaggtacaactggtggaatcaggtggaggtttggtgcagccggggagatcgctcaggcttagctgtgcggcatcggggtttactttcgatgattatgcgatgcattgggtccggcaagcgcctggaaaagggctcgagtgggtttccgccattacgtggaatagcggacacatcgattatgcagacagtgtggagggcagattcacaatctcacgagacaatgctaagaacagcctgtaccttcagatgaactcacttcgcgcggaagataccgccgtatactactgcgccaaagtctcctacttgtctacagcttcgtcgctcgactattggggtaaaggaacgttggtcaccgtctctagtactgtggctgcaccatctgtcttcatcttcccgccatctgatgagcagttgaaatctggaactgcctctgttgtgtgcctgctgaataacttctatcccagagaggccaaagtacagtggaaggtggataacgccctccaatcgggtaactcccaggagagtgtcacagagcaggacagcaaggacagcacctacagcctcgaaagcaccctgacgctgagcaaagcagactacgagaaacacaaagtctacgcctgcgaagtcacccatcagggcctgagctcgcccgtcacaaagagcttcaacaggggagagtgt

SEQ ID NO: 842 - DNA, 633 bp, synthetic construct; identical to SEQ ID NO: 759
  misc_feature 1..633: note = source = /note="Description of Artificial Sequence: Synthetic polynucleotide"
  source 1..633: mol_type = other DNA

SEQ ID NO: 843 - DNA, 633 bp, synthetic construct; identical to SEQ ID NO: 699
  misc_feature 1..633: note = source = /note="Description of Artificial Sequence: Synthetic polynucleotide"
  source 1..633: mol_type = other DNA

SEQ ID NO: 844 - protein, 686 aa, synthetic construct
  REGION 1..686: note = source = /note="Description of Artificial Sequence: Synthetic polypeptide"
QVQLQESGPGLVKPSETLSLTCTVSGGSISSYFWSWIRQPPGKKLEWIGYIYYSGQTKYNPSLKSRVTISIDTSKNQFSLKLSSVTAADTAVYYCARETGSYYGFDYWGQGTLVTVSSTVAAPSVFIFPPSDEQLKSGTASVVCLLNNFYPREAKVQWKVDNALQSGNSQESVTEQDSKDSTYSLKSTLTLSKADYEKHKVYACEVTHQGLSSPVTKSFNRGECDKTHTCPPCPAPELLGGPSVFLFPPKPKDTLMISRTPEVTCVVVDVSHEDPEVKFNWYVDGVEVHNAKTKPCEEQYGSTYRCVSVLTVLHQDWLNGKEYKCKVSNKALPAPIEKTISKAKGQPREPQVYTLPPSREEMTKNQVSLTCLVKGFYPSDIAVEWESNGQPENNYKTTPPVLDSDGSFFLYSKLTVDKSRWQQGNVFSCSVMHEALHNHYTQKSLSLSPGGGGSGGGGSEVQLVESGGGLVQPGRSLRLSCAASGFTFDDYAMHWVRQAPGKGLEWVSAITWNSGHIDYADSVEGRFTISRDNAKNSLYLQMNSLRAEDTAVYYCAKVSYLSTASSLDYWGKGTLVTVSSTVAAPSVFIFPPSDEQLKSGTASVVCLLNNFYPREAKVQWKVDNALQSGNSQESVTEQDSKDSTYSLESTLTLSKADYEKHKVYACEVTHQGLSSPVTKSFNRGEC

SEQ ID NO: 845 - protein, 211 aa, synthetic construct; identical to SEQ ID NO: 762
  REGION 1..211: note = source = /note="Description of Artificial Sequence: Synthetic polypeptide"

SEQ ID NO: 846 - protein, 211 aa, synthetic construct; identical to SEQ ID NO: 702
  REGION 1..211: note = source = /note="Description of Artificial Sequence: Synthetic polypeptide"

SEQ ID NO: 847 - DNA, 2040 bp, synthetic construct
  misc_feature 1..2040: note = source = /note="Description of Artificial Sequence: Synthetic polynucleotide"
  source 1..2040: mol_type = other DNA
caggtgcagctgcaggagtcgggcccaggactggtgaagccttcggagaccctgtccctcacctgcactgtctctggtggctccatcagtagttacttctggagctggattcggcagcccccaggtaagaaactggagtggattggctatatctattacagtgggcagaccaaatacaacccctccctcaagagtcgagtcaccatatcaatagacacgtccaagaaccagttctccctgaagctgagctctgtgaccgctgcggacacggccgtgtattactgtgcgagagaaactgggagctactacggctttgactactggggccagggaaccctggtcaccgtctcctcaacggtggctgcaccatctgtcttcatcttcccgccatctgatgagcagttgaaatctggaactgcctctgttgtgtgcctgctgaataacttctatcccagagaggccaaagtacagtggaaggtggataacgccctccaatcgggtaactcccaggagagtgtcacagagcaggacagcaaggacagcacctacagcctcaagagcaccctgacgctgagcaaagcagactacgagaaacacaaagtctacgcctgcgaagtcacccatcagggcctgagctcgcccgtcacaaagagcttcaacaggggagagtgtgacaaaactcacacatgcccaccgtgcccagcacctgaactcctggggggaccgtcagtcttcctcttccccccaaaacccaaggacaccctcatgatctcccggacccctgaggtcacatgcgtggtggtggacgtgagccacgaagaccctgaggtcaagttcaactggtacgtggacggcgtggaggtgcataatgccaagacaaagccgtgtgaggagcagtacggcagcacgtaccgttgtgtcagcgtcctcaccgtcctgcaccaggactggctgaatggcaaggagtacaagtgcaaggtctccaacaaagccctcccagcccccatcgagaaaaccatctccaaagccaaagggcagccccgagaaccacaggtgtacaccctgcccccatcccgggaggagatgaccaagaaccaggtcagcctgacctgcctggtcaaaggcttctatcccagcgacatcgccgtggagtgggagagcaatgggcagccggagaacaactacaagaccacgcctcccgtgctggactccgacggctccttcttcctctatagcaagctcaccgtggacaagagcaggtggcagcaggggaacgtcttctcatgctccgtgatgcatgaggctctgcacaaccactacacgcagaagagcctctccctgtctccgggtggtggcggatcgggaggtggcggatccgaggtgcagctggtgcagtctggagcagaggtgaaaaagcccggggagtctctgaagatctcctgtaagacttctgaatacagctttaccagctactggatcggctgggtgcgccagatgcccgggaaaggcctggagtggatggggatcatctatcttggtgactcagataccagatacagcccgtccttccaaggccaggtcaccatctcagccgacaagtccatcagtaccgcctacctgcagtggagcagcctgaaggcctcggacaccgccatgtattactgtgcgagaagtaactggggtcttgactactggggcaagggaaccctggtcaccgtctctagtcagcccaaggccaaccccactgtcactctgttcccgccctcctctgaggagctccaagccaacaaggccacactagtgtgtctgatcagtgacttctacccgggagctgtgacagtggcctggaaggcagatggcagccccgtcaaggcgggagtggagaccaccaaaccctccaaacagagcaacaacaagtacgcggccgagagctacctgagcctgacgcccgagcagtggaagtcccacagaagctacagctgccaggtcacgcatgaagggagcaccgtggagaagacagtggcccctacagaatgttca

SEQ ID NO: 848 - DNA, 645 bp, synthetic construct; identical to SEQ ID NO: 765
  misc_feature 1..645: note = source = /note="Description of Artificial Sequence: Synthetic polynucleotide"
  source 1..645: mol_type = other DNA

SEQ ID NO: 849 - DNA, 633 bp, synthetic construct; identical to SEQ ID NO: 699
  misc_feature 1..633: note = source = /note="Description of Artificial Sequence: Synthetic polynucleotide"
  source 1..633: mol_type = other DNA

SEQ ID NO: 850 - protein, 680 aa, synthetic construct
  REGION 1..680: note = source = /note="Description of Artificial Sequence: Synthetic polypeptide"
QVQLQESGPGLVKPSETLSLTCTVSGGSISSYFWSWIRQPPGKKLEWIGYIYYSGQTKYNPSLKSRVTISIDTSKNQFSLKLSSVTAADTAVYYCARETGSYYGFDYWGQGTLVTVSSTVAAPSVFIFPPSDEQLKSGTASVVCLLNNFYPREAKVQWKVDNALQSGNSQESVTEQDSKDSTYSLKSTLTLSKADYEKHKVYACEVTHQGLSSPVTKSFNRGECDKTHTCPPCPAPELLGGPSVFLFPPKPKDTLMISRTPEVTCVVVDVSHEDPEVKFNWYVDGVEVHNAKTKPCEEQYGSTYRCVSVLTVLHQDWLNGKEYKCKVSNKALPAPIEKTISKAKGQPREPQVYTLPPSREEMTKNQVSLTCLVKGFYPSDIAVEWESNGQPENNYKTTPPVLDSDGSFFLYSKLTVDKSRWQQGNVFSCSVMHEALHNHYTQKSLSLSPGGGGSGGGGSEVQLVQSGAEVKKPGESLKISCKTSEYSFTSYWIGWVRQMPGKGLEWMGIIYLGDSDTRYSPSFQGQVTISADKSISTAYLQWSSLKASDTAMYYCARSNWGLDYWGKGTLVTVSSQPKANPTVTLFPPSSEELQANKATLVCLISDFYPGAVTVAWKADGSPVKAGVETTKPSKQSNNKYAAESYLSLTPEQWKSHRSYSCQVTHEGSTVEKTVAPTECS

SEQ ID NO: 851 - protein, 215 aa, synthetic construct; identical to SEQ ID NO: 768
  REGION 1..215: note = source = /note="Description of Artificial Sequence: Synthetic polypeptide"

SEQ ID NO: 852 - protein, 211 aa, synthetic construct; identical to SEQ ID NO: 702
  REGION 1..211: note = source = /note="Description of Artificial Sequence: Synthetic polypeptide"

SEQ ID NO: 853 - DNA, 2079 bp, synthetic construct
  misc_feature 1..2079: note = source = /note="Description of Artificial Sequence: Synthetic polynucleotide"
  source 1..2079: mol_type = other DNA
caggtacagttgcaggagtcaggtccaggactggtgaagccctcggagaccctctcactcacctgtaccatctccggggacagtgtctctaccaacagtgttgcttggaactggattaggcagcccccagggaaaaaacttgagtggataggaaggacatactacaggtccaagtggtataatgattatgcagtttctctgaaaagtcgagtaaccatcagcccagacacatccaagaaccagttctccctgaagctgagctctgtgactgccgcggacacggctgtgtattactgtgcaagagaggatggggatagctactaccgctacggtatggacgtctggggccaagggaccacggtcaccgtctcctcaacggtggctgcaccatctgtcttcatcttcccgccatctgatgagcagttgaaatctggaactgcctctgttgtgtgcctgctgaataacttctatcccagagaggccaaagtacagtggaaggtggataacgccctccaatcgggtaactcccaggagagtgtcacagagcaggacagcaaggacagcacctacagcctcaagagcaccctgacgctgagcaaagcagactacgagaaacacaaagtctacgcctgcgaagtcacccatcagggcctgagctcgcccgtcacaaagagcttcaacaggggagagtgtgacaaaactcacacatgcccaccgtgcccagcacctgaactcctggggggaccgtcagtcttcctcttccccccaaaacccaaggacaccctcatgatctcccggacccctgaggtcacatgcgtggtggtggacgtgagccacgaagaccctgaggtcaagttcaactggtacgtggacggcgtggaggtgcataatgccaagacaaagccgtgtgaggagcagtacggcagcacgtaccgttgtgtcagcgtcctcaccgtcctgcaccaggactggctgaatggcaaggagtacaagtgcaaggtctccaacaaagccctcccagcccccatcgagaaaaccatctccaaagccaaagggcagccccgagaaccacaggtgtacaccctgcccccatcccgggaggagatgaccaagaaccaggtcagcctgacctgcctggtcaaaggcttctatcccagcgacatcgccgtggagtgggagagcaatgggcagccggagaacaactacaagaccacgcctcccgtgctggactccgacggctccttcttcctctatagcaagctcaccgtggacaagagcaggtggcagcaggggaacgtcttctcatgctccgtgatgcatgaggctctgcacaaccactacacgcagaagagcctctccctgtctccgggtggtggcggatcgggaggtggcggatccgaggtacaactggtggaatcaggtggaggtttggtgcagccggggagatcgctcaggcttagctgtgcggcatcggggtttactttcgatgattatgcgatgcattgggtccggcaagcgcctggaaaagggctcgagtgggtttccgccattacgtggaatagcggacacatcgattatgcagacagtgtggagggcagattcacaatctcacgagacaatgctaagaacagcctgtaccttcagatgaactcacttcgcgcggaagataccgccgtatactactgcgccaaagtctcctacttgtctacagcttcgtcgctcgactattggggtaaaggaacgttggtcaccgtctctagtactgtggctgcaccatctgtcttcatcttcccgccatctgatgagcagttgaaatctggaactgcctctgttgtgtgcctgctgaataacttctatcccagagaggccaaagtacagtggaaggtggataacgccctccaatcgggtaactcccaggagagtgtcacagagcaggacagcaaggacagcacctacagcctcgaaagcaccctgacgctgagcaaagcagactacgagaaacacaaagtctacgcctgcgaagtcacccatcagggcctgagctcgcccgtcacaaagagcttcaacaggggagagtgt

SEQ ID NO: 854 - DNA, 633 bp, synthetic construct; identical to SEQ ID NO: 759
  misc_feature 1..633: note = source = /note="Description of Artificial Sequence: Synthetic polynucleotide"
  source 1..633: mol_type = other DNA

SEQ ID NO: 855 - DNA, 651 bp, synthetic construct; identical to SEQ ID NO: 711
  misc_feature 1..651: note = source = /note="Description of Artificial Sequence: Synthetic polynucleotide"
  source 1..651: mol_type = other DNA

SEQ ID NO: 856 - protein, 693 aa, synthetic construct
  REGION 1..693: note = source = /note="Description of Artificial Sequence: Synthetic polypeptide"
QVQLQESGPGLVKPSETLSLTCTISGDSVSTNSVAWNWIRQPPGKKLEWIGRTYYRSKWYNDYAVSLKSRVTISPDTSKNQFSLKLSSVTAADTAVYYCAREDGDSYYRYGMDVWGQGTTVTVSSTVAAPSVFIFPPSDEQLKSGTASVVCLLNNFYPREAKVQWKVDNALQSGNSQESVTEQDSKDSTYSLKSTLTLSKADYEKHKVYACEVTHQGLSSPVTKSFNRGECDKTHTCPPCPAPELLGGPSVFLFPPKPKDTLMISRTPEVTCVVVDVSHEDPEVKFNWYVDGVEVHNAKTKPCEEQYGSTYRCVSVLTVLHQDWLNGKEYKCKVSNKALPAPIEKTISKAKGQPREPQVYTLPPSREEMTKNQVSLTCLVKGFYPSDIAVEWESNGQPENNYKTTPPVLDSDGSFFLYSKLTVDKSRWQQGNVFSCSVMHEALHNHYTQKSLSLSPGGGGSGGGGSEVQLVESGGGLVQPGRSLRLSCAASGFTFDDYAMHWVRQAPGKGLEWVSAITWNSGHIDYADSVEGRFTISRDNAKNSLYLQMNSLRAEDTAVYYCAKVSYLSTASSLDYWGKGTLVTVSSTVAAPSVFIFPPSDEQLKSGTASVVCLLNNFYPREAKVQWKVDNALQSGNSQESVTEQDSKDSTYSLESTLTLSKADYEKHKVYACEVTHQGLSSPVTKSFNRGEC

SEQ ID NO: 857 - protein, 211 aa, synthetic construct; identical to SEQ ID NO: 762
  REGION 1..211: note = source = /note="Description of Artificial Sequence: Synthetic polypeptide"

SEQ ID NO: 858 - protein, 217 aa, synthetic construct; identical to SEQ ID NO: 714
  REGION 1..217: note = source = /note="Description of Artificial Sequence: Synthetic polypeptide"

SEQ ID NO: 859 - DNA, 2061 bp, synthetic construct
  misc_feature 1..2061: note = source = /note="Description of Artificial Sequence: Synthetic polynucleotide"
  source 1..2061: mol_type = other DNA
caggtacagttgcaggagtcaggtccaggactggtgaagccctcggagaccctctcactcacctgtaccatctccggggacagtgtctctaccaacagtgttgcttggaactggattaggcagcccccagggaaaaaacttgagtggataggaaggacatactacaggtccaagtggtataatgattatgcagtttctctgaaaagtcgagtaaccatcagcccagacacatccaagaaccagttctccctgaagctgagctctgtgactgccgcggacacggctgtgtattactgtgcaagagaggatggggatagctactaccgctacggtatggacgtctggggccaagggaccacggtcaccgtctcctcaacggtggctgcaccatctgtcttcatcttcccgccatctgatgagcagttgaaatctggaactgcctctgttgtgtgcctgctgaataacttctatcccagagaggccaaagtacagtggaaggtggataacgccctccaatcgggtaactcccaggagagtgtcacagagcaggacagcaaggacagcacctacagcctcaagagcaccctgacgctgagcaaagcagactacgagaaacacaaagtctacgcctgcgaagtcacccatcagggcctgagctcgcccgtcacaaagagcttcaacaggggagagtgtgacaaaactcacacatgcccaccgtgcccagcacctgaactcctggggggaccgtcagtcttcctcttccccccaaaacccaaggacaccctcatgatctcccggacccctgaggtcacatgcgtggtggtggacgtgagccacgaagaccctgaggtcaagttcaactggtacgtggacggcgtggaggtgcataatgccaagacaaagccgtgtgaggagcagtacggcagcacgtaccgttgtgtcagcgtcctcaccgtcctgcaccaggactggctgaatggcaaggagtacaagtgcaaggtctccaacaaagccctcccagcccccatcgagaaaaccatctccaaagccaaagggcagccccgagaaccacaggtgtacaccctgcccccatcccgggaggagatgaccaagaaccaggtcagcctgacctgcctggtcaaaggcttctatcccagcgacatcgccgtggagtgggagagcaatgggcagccggagaacaactacaagaccacgcctcccgtgctggactccgacggctccttcttcctctatagcaagctcaccgtggacaagagcaggtggcagcaggggaacgtcttctcatgctccgtgatgcatgaggctctgcacaaccactacacgcagaagagcctctccctgtctccgggtggtggcggatcgggaggtggcggatccgaggtgcagctggtgcagtctggagcagaggtgaaaaagcccggggagtctctgaagatctcctgtaagacttctgaatacagctttaccagctactggatcggctgggtgcgccagatgcccgggaaaggcctggagtggatggggatcatctatcttggtgactcagataccagatacagcccgtccttccaaggccaggtcaccatctcagccgacaagtccatcagtaccgcctacctgcagtggagcagcctgaaggcctcggacaccgccatgtattactgtgcgagaagtaactggggtcttgactactggggcaagggaaccctggtcaccgtctctagtcagcccaaggccaaccccactgtcactctgttcccgccctcctctgaggagctccaagccaacaaggccacactagtgtgtctgatcagtgacttctacccgggagctgtgacagtggcctggaaggcagatggcagccccgtcaaggcgggagtggagaccaccaaaccctccaaacagagcaacaacaagtacgcggccgagagctacctgagcctgacgcccgagcagtggaagtcccacagaagctacagctgccaggtcacgcatgaagggagcaccgtggagaagacagtggcccctacagaatgttca

SEQ ID NO: 860 - DNA, 645 bp, synthetic construct; identical to SEQ ID NO: 765
  misc_feature 1..645: note = source = /note="Description of Artificial Sequence: Synthetic polynucleotide"
  source 1..645: mol_type = other DNA

SEQ ID NO: 861 - DNA, 651 bp, synthetic construct; identical to SEQ ID NO: 711
  misc_feature 1..651: note = source = /note="Description of Artificial Sequence: Synthetic polynucleotide"
  source 1..651: mol_type = other DNA

SEQ ID NO: 862 - protein, 687 aa, synthetic construct
  REGION 1..687: note = source = /note="Description of Artificial Sequence: Synthetic polypeptide"
QVQLQESGPGLVKPSETLSLTCTISGDSVSTNSVAWNWIRQPPGKKLEWIGRTYYRSKWYNDYAVSLKSRVTISPDTSKNQFSLKLSSVTAADTAVYYCAREDGDSYYRYGMDVWGQGTTVTVSSTVAAPSVFIFPPSDEQLKSGTASVVCLLNNFYPREAKVQWKVDNALQSGNSQESVTEQDSKDSTYSLKSTLTLSKADYEKHKVYACEVTHQGLSSPVTKSFNRGECDKTHTCPPCPAPELLGGPSVFLFPPKPKDTLMISRTPEVTCVVVDVSHEDPEVKFNWYVDGVEVHNAKTKPCEEQYGSTYRCVSVLTVLHQDWLNGKEYKCKVSNKALPAPIEKTISKAKGQPREPQVYTLPPSREEMTKNQVSLTCLVKGFYPSDIAVEWESNGQPENNYKTTPPVLDSDGSFFLYSKLTVDKSRWQQGNVFSCSVMHEALHNHYTQKSLSLSPGGGGSGGGGSEVQLVQSGAEVKKPGESLKISCKTSEYSFTSYWIGWVRQMPGKGLEWMGIIYLGDSDTRYSPSFQGQVTISADKSISTAYLQWSSLKASDTAMYYCARSNWGLDYWGKGTLVTVSSQPKANPTVTLFPPSSEELQANKATLVCLISDFYPGAVTVAWKADGSPVKAGVETTKPSKQSNNKYAAESYLSLTPEQWKSHRSYSCQVTHEGSTVEKTVAPTECS

SEQ ID NO: 863 - protein, 215 aa, synthetic construct; identical to SEQ ID NO: 768
  REGION 1..215: note = source = /note="Description of Artificial Sequence: Synthetic polypeptide"

SEQ ID NO: 864 - protein, 217 aa, synthetic construct; identical to SEQ ID NO: 714
  REGION 1..217: note = source = /note="Description of Artificial Sequence: Synthetic polypeptide"

SEQ ID NO: 865 - DNA, 33 bp, synthetic construct
  misc_feature 1..33: note = source = /note="Description of Artificial Sequence: Synthetic oligonucleotide"
  source 1..33: mol_type = other DNA
cgcgcgtcccagggaatccggaattacctcgca

SEQ ID NO: 866 - DNA, 21 bp, synthetic construct
  misc_feature 1..21: note = source = /note="Description of Artificial Sequence: Synthetic oligonucleotide"
  source 1..21: mol_type = other DNA
gccgcctcgactcttcagagt

SEQ ID NO: 867 - DNA, 27 bp, synthetic construct
  misc_feature 1..27: note = source = /note="Description of Artificial Sequence: Synthetic oligonucleotide"
  source 1..27: mol_type = other DNA
cagagatacaaccgagcgccttacaca

SEQ ID NO: 868 - protein, 11 aa, synthetic construct
  REGION 1..11: note = source = /note="Description of Artificial Sequence: Synthetic peptide"
RASQGIRNYLA

SEQ ID NO: 869 - protein, 7 aa, synthetic construct
  REGION 1..7: note = source = /note="Description of Artificial Sequence: Synthetic peptide"
AASTLQS

SEQ ID NO: 870 - protein, 9 aa, synthetic construct
  REGION 1..9: note = source = /note="Description of Artificial Sequence: Synthetic peptide"
QRYNRAPYT

SEQ ID NO: 871 - DNA, 42 bp, synthetic construct
  misc_feature 1..42: note = source = /note="Description of Artificial Sequence: Synthetic oligonucleotide"
  source 1..42: mol_type = other DNA
actgggagcagttccaacatcggggcaggttatgatgtacac

SEQ ID NO: 872 - DNA, 21 bp, synthetic construct
  misc_feature 1..21: note = source = /note="Description of Artificial Sequence: Synthetic oligonucleotide"
  source 1..21: mol_type = other DNA
ggtaacagcaatcggccctca

SEQ ID NO: 873 - DNA, 33 bp, synthetic construct
  misc_feature 1..33: note = source = /note="Description of Artificial Sequence: Synthetic oligonucleotide"
  source 1..33: mol_type = other DNA
cagtcctatgacagcagcctgagtggttcggtg

SEQ ID NO: 874 - protein, 14 aa, synthetic construct
  REGION 1..14: note = source = /note="Description of Artificial Sequence: Synthetic peptide"
TGSSSNIGAGYDVH

SEQ ID NO: 875 - protein, 7 aa, synthetic construct
  REGION 1..7: note = source = /note="Description of Artificial Sequence: Synthetic peptide"
GNSNRPS

SEQ ID NO: 876 - protein, 11 aa, synthetic construct
  REGION 1..11: note = source = /note="Description of Artificial Sequence: Synthetic peptide"
QSYDSSLSGSV

SEQ ID NO: 877 - DNA, 36 bp, synthetic construct
  misc_feature 1..36: note = source = /note="Description of Artificial Sequence: Synthetic oligonucleotide"
  source 1..36: mol_type = other DNA
agggccagtcagagtgttagaagcagttacttagcc

SEQ ID NO: 878 - DNA, 21 bp, synthetic construct
  misc_feature 1..21: note = source = /note="Description of Artificial Sequence: Synthetic oligonucleotide"
  source 1..21: mol_type = other DNA
ggtgcatccagcagggccact

SEQ ID NO: 879 - DNA, 24 bp, synthetic construct
  misc_feature 1..24: note = source = /note="Description of Artificial Sequence: Synthetic oligonucleotide"
  source 1..24: mol_type = other DNA
cagcagtatggtagctcacctacc

SEQ ID NO: 880 - protein, 12 aa, synthetic construct
  REGION 1..12: note = source = /note="Description of Artificial Sequence: Synthetic peptide"
RASQSVRSSYLA

SEQ ID NO: 881 - protein, 7 aa, synthetic construct
  REGION 1..7: note = source = /note="Description of Artificial Sequence: Synthetic peptide"
GASSRAT

SEQ ID NO: 882 - protein, 8 aa, synthetic construct
  REGION 1..8: note = source = /note="Description of Artificial Sequence: Synthetic peptide"
QQYGSSPT

SEQ ID NO: 883 - DNA, 33 bp, synthetic construct
  misc_feature 1..33: note = source = /note="Description of Artificial Sequence: Synthetic oligonucleotide"
  source 1..33: mol_type = other DNA
cgggcaagtcagagcattaacaactatttaaat

SEQ ID NO: 884 - DNA, 21 bp, synthetic construct
  misc_feature 1..21: note = source = /note="Description of Artificial Sequence: Synthetic oligonucleotide"
  source 1..21: mol_type = other DNA
gctgcatccagtttgcaaagt

SEQ ID NO: 885 - DNA, 27 bp, synthetic construct
  misc_feature 1..27: note = source = /note="Description of Artificial Sequence: Synthetic oligonucleotide"
  source 1..27: mol_type = other DNA
caacagagttacagtacccctcggacg

SEQ ID NO: 886 - protein, 11 aa, synthetic construct
  REGION 1..11: note = source = /note="Description of Artificial Sequence: Synthetic peptide"
RASQSINNYLN

SEQ ID NO: 887 - protein, 7 aa, synthetic construct
  REGION 1..7: note = source = /note="Description of Artificial Sequence: Synthetic peptide"
AASSLQS

SEQ ID NO: 888 - protein, 9 aa, synthetic construct
  REGION 1..9: note = source = /note="Description of Artificial Sequence: Synthetic peptide"
QQSYSTPRT

SEQ ID NO: 889 - DNA, 51 bp, synthetic construct
  misc_feature 1..51: note = source = /note="Description of Artificial Sequence: Synthetic oligonucleotide"
  source 1..51: mol_type = other DNA
aggtccagccagagtgtgttatacagctccaacaataagaactacttagtt

SEQ ID NO: 890 - DNA, 21 bp, synthetic construct
  misc_feature 1..21: note = source = /note="Description of Artificial Sequence: Synthetic oligonucleotide"
  source 1..21: mol_type = other DNA
tgggcatctacccgggaatcc

SEQ ID NO: 891 - DNA, 27 bp, synthetic construct
  misc_feature 1..27: note = source = /note="Description of Artificial Sequence: Synthetic oligonucleotide"
  source 1..27: mol_type = other DNA
cagcaatattataagactcctctcact

SEQ ID NO: 892 - protein, 17 aa, synthetic construct
  REGION 1..17: note = source = /note="Description of Artificial Sequence: Synthetic peptide"
RSSQSVLYSSNNKNYLV

SEQ ID NO: 893 - protein, 7 aa, synthetic construct
  REGION 1..7: note = source = /note="Description of Artificial Sequence: Synthetic peptide"
WASTRES

SEQ ID NO: 894 - protein, 9 aa, synthetic construct
  REGION 1..9: note = source = /note="Description of Artificial Sequence: Synthetic peptide"
QQYYKTPLT

SEQ ID NO: 895 - DNA, 15 bp, synthetic construct
  misc_feature 1..15: note = source = /note="Description of Artificial Sequence: Synthetic oligonucleotide"
  source 1..15: mol_type = other DNA
gattatgcgatgcat

SEQ ID NO: 896 - DNA, 51 bp, synthetic construct
  misc_feature 1..51: note = source = /note="Description of Artificial Sequence: Synthetic oligonucleotide"
  source 1..51: mol_type = other DNA
gccattacgtggaatagcggacacatcgattatgcagacagtgtggagggc

SEQ ID NO: 897 - DNA, 36 bp, synthetic construct
  misc_feature 1..36: note = source = /note="Description of Artificial Sequence: Synthetic oligonucleotide"
  source 1..36: mol_type = other DNA
gtctcctacttgtctacagcttcgtcgctcgactat

SEQ ID NO: 898 - protein, 5 aa, synthetic construct
  REGION 1..5: note = source = /note="Description of Artificial Sequence: Synthetic peptide"
DYAMH

SEQ ID NO: 899 - protein, 17 aa, synthetic construct
  REGION 1..17: note = source = /note="Description of Artificial Sequence: Synthetic peptide"
AITWNSGHIDYADSVEG

SEQ ID NO: 900 - protein, 12 aa, synthetic construct
  REGION 1..12: note = source = /note="Description of Artificial Sequence: Synthetic peptide"
VSYLSTASSLDY

SEQ ID NO: 901 - DNA, 15 bp, synthetic construct
  misc_feature 1..15: note = source = /note="Description of Artificial Sequence: Synthetic oligonucleotide"
  source 1..15: mol_type = other DNA
agctactggatcggc

SEQ ID NO: 902 - DNA, 51 bp, synthetic construct
  misc_feature 1..51: note = source = /note="Description of Artificial Sequence: Synthetic oligonucleotide"
  source 1..51: mol_type = other DNA
atcatctatcttggtgactcagataccagatacagcccgtccttccaaggc

SEQ ID NO: 903 - DNA, 21 bp, synthetic construct
  misc_feature 1..21: note = source = /note="Description of Artificial Sequence: Synthetic oligonucleotide"
  source 1..21: mol_type = other DNA
agtaactggggtcttgactac

SEQ ID NO: 904 - protein, 5 aa, synthetic construct
  REGION 1..5: note = source = /note="Description of Artificial Sequence: Synthetic peptide"
SYWIG

SEQ ID NO: 905 - protein, 17 aa, synthetic construct
  REGION 1..17: note = source = /note="Description of Artificial Sequence: Synthetic peptide"
IIYLGDSDTRYSPSFQG

SEQ ID NO: 906 - protein, 7 aa, synthetic construct
  REGION 1..7: note = source = /note="Description of Artificial Sequence: Synthetic peptide"
SNWGLDY

SEQ ID NO: 907 - DNA, 15 bp, synthetic construct
  misc_feature 1..15: note = source = /note="Description of Artificial Sequence: Synthetic oligonucleotide"
  source 1..15: mol_type = other DNA
ggttactactggaac

SEQ ID NO: 908 - DNA, 48 bp, synthetic construct
  misc_feature 1..48: note = source = /note="Description of Artificial Sequence: Synthetic oligonucleotide"
  source 1..48: mol_type = other DNA
gaaatcaatcatgctggaaacaccaactacaacccgtccctcaagagt

SEQ ID NO: 909 - DNA, 36 bp, synthetic construct
  misc_feature 1..36: note = source = /note="Description of Artificial Sequence: Synthetic oligonucleotide"
  source 1..36: mol_type = other DNA
ggatattgtagaagtaccacctgctactttgactac

SEQ ID NO: 910 - protein, 5 aa, synthetic construct
  REGION 1..5: note = source = /note="Description of Artificial Sequence: Synthetic peptide"
GYYWN

SEQ ID NO: 911 - protein, 16 aa, synthetic construct
  REGION 1..16: note = source = /note="Description of Artificial Sequence: Synthetic peptide"
EINHAGNTNYNPSLKS

SEQ ID NO: 912 - protein, 12 aa, synthetic construct
  REGION 1..12: note = source = /note="Description of Artificial Sequence: Synthetic peptide"
GYCRSTTCYFDY

SEQ ID NO: 913 - DNA, 15 bp, synthetic construct
  misc_feature 1..15: note = source = /note="Description of Artificial Sequence: Synthetic oligonucleotide"
  source 1..15: mol_type = other DNA
agttacttctggagc

SEQ ID NO: 914 - DNA, 48 bp, synthetic construct
  misc_feature 1..48: note = source = /note="Description of Artificial Sequence: Synthetic oligonucleotide"
  source 1..48: mol_type = other DNA
tatatctattacagtgggcagaccaaatacaacccctccctcaagagt

SEQ ID NO: 915 - DNA, 30 bp, synthetic construct
  misc_feature 1..30: note = source = /note="Description of Artificial Sequence: Synthetic oligonucleotide"
  source 1..30: mol_type = other DNA
gaaactgggagctactacggctttgactac

SEQ ID NO: 916 - protein, 5 aa, synthetic construct
  REGION 1..5: note = source = /note="Description of Artificial Sequence: Synthetic peptide"
SYFWS

SEQ ID NO: 917 - protein, 16 aa, synthetic construct
  REGION 1..16: note = source = /note="Description of Artificial Sequence: Synthetic peptide"
YIYYSGQTKYNPSLKS

SEQ ID NO: 918 - protein, 10 aa, synthetic construct
  REGION 1..10: note = source = /note="Description of Artificial Sequence: Synthetic peptide"
ETGSYYGFDY

SEQ ID NO: 919 - DNA, 21 bp, synthetic construct
  misc_feature 1..21: note = source = /note="Description of Artificial Sequence: Synthetic oligonucleotide"
  source 1..21: mol_type = other DNA
accaacagtgttgcttggaac

SEQ ID NO: 920 - DNA, 54 bp, synthetic construct
  misc_feature 1..54: note = source = /note="Description of Artificial Sequence: Synthetic oligonucleotide"
  source 1..54: mol_type = other DNA
aggacatactacaggtccaagtggtataatgattatgcagtttctctgaaaagt

SEQ ID NO: 921 - DNA, 39 bp, synthetic construct
  misc_feature 1..39: note = source = /note="Description of Artificial Sequence: Synthetic oligonucleotide"
  source 1..39: mol_type = other DNA
gaggatggggatagctactaccgctacggtatggacgtc

SEQ ID NO: 922 - protein, 7 aa, synthetic construct
  REGION 1..7: note = source = /note="Description of Artificial Sequence: Synthetic peptide"
TNSVAWN

SEQ ID NO: 923 - protein, 18 aa, synthetic construct
  REGION 1..18: note = source = /note="Description of Artificial Sequence: Synthetic peptide"
RTYYRSKWYNDYAVSLKS

SEQ ID NO: 924 - protein, 13 aa, synthetic construct
  REGION 1..13: note = source = /note="Description of Artificial Sequence: Synthetic peptide"
EDGDSYYRYGMDV

SEQ ID NO: 925 - protein, 106 aa, Homo sapiens
GQPKAAPSVTLFPPSSEELQANKATLVCLISDFYPGAVTVAWKADSSPVKAGVETTTPSKQSNNKYAASSYLSLTPEQWKSHRSYSCQVTHEGSTVEKTVAPTECS

SEQ ID NO: 926 - protein, 106 aa, Homo sapiens
GQPKAAPSVTLFPPSSEELQANKATLVCLISDFYPGAVTVAWKADSSPVKAGVETTTPSKQSNNKYAASSYLSLTPEQWKSHKSYSCQVTHEGSTVEKTVAPTECS

SEQ ID NO: 927 - protein, 106 aa, Homo sapiens
GQPKAAPSVTLFPPSSEELQANKATLVCLVSDFYPGAVTVAWKADGSPVKVGVETTKPSKQSNNKYAASSYLSLTPEQWKSHRSYSCRVTHEGSTVEKTVAPAECS

SEQ ID NO: 928 - protein, 330 aa, Homo sapiens
ASTKGPSVFPLAPSSKSTSGGTAALGCLVKDYFPEPVTVSWNSGALTSGVHTFPAVLQSSGLYSLSSVVTVPSSSLGTQTYICNVNHKPSNTKVDKKVEPKSCDKTHTCPPCPAPELLGGPSVFLFPPKPKDTLMISRTPEVTCVVVDVSHEDPEVKFNWYVDGVEVHNAKTKPREEQYNSTYRVVSVLTVLHQDWLNGKEYKCKVSNKALPAPIEKTISKAKGQPREPQVYTLPPSREEMTKNQVSLTCLVKGFYPSDIAVEWESNGQPENNYKTTPPVLDSDGSFFLYSKLTVDKSRWQQGNVFSCSVMHEALHNHYTQKSLSLSPGK

SEQ ID NO: 929 - protein, 330 aa, Homo sapiens [sequence omitted]

SEQ ID NO: 930 - protein, 330 aa, Homo sapiens
ASTKGPSVFPLAPSSKSTSGGTAALGCLVKDYFPEPVTVSWNSGALTSGVHTFPAVLQSSGLYSLSSVVTVPSSSLGTQTYICNVNHKPSNTKVDKRVEPKSCDKTHTCPPCPAPELLGGPSVFLFPPKPKDTLMISRTPEVTCVVVDVSHEDPEVKFNWYVDGVEVHNAKTKPREEQYNSTYRVVSVLTVLHQDWLNGKEYKCKVSNKALPAPIEKTISKAKGQPREPQVYTLPPSREEMTKNQVSLTCLVKGFYPSDIAVEWESNGQPENNYKTTPPVLDSDGSFFLYSKLTVDKSRWQQGNVFSCSVMHEALHNHYTQKSLSLSPGK

SEQ ID NO: 931 - protein, 330 aa, Homo sapiens
ASTKGPSVFPLAPSSKSTSGGTAALGCLVKDYFPEPVTVSWNSGALTSGVHTFPAVLQSSGLYSLSSVVTVPSSSLGTQTYICNVNHKPSNTKVDKRVEPKSCDKTHTCPPCPAPELLGGPSVFLFPPKPKDTLMISRTPEVTCVVVDVSHEDPEVKFNWYVDGVEVHNAKTKPREEQYNSTYRVVSVLTVLHQDWLNGKEYKCKVSNKALPAPIEKTISKAKGQPREPQVYTLPPSRDELTKNQVSLTCLVKGFYPSDIAVEWESNGQPENNYKTTPPVLDSDGSFFLYSKLTVDKSRWQQGNVFSCSVMHEALHNHYTQKSLSLSPGK

SEQ ID NO: 932 - protein, 326 aa, Homo sapiens
ASTKGPSVFPLAPCSRSTSESTAALGCLVKDYFPEPVTVSWNSGALTSGVHTFPAVLQSSGLYSLSSVVTVPSSNFGTQTYTCNVDHKPSNTKVDKTVERKCCVECPPCPAPPVAGPSVFLFPPKPKDTLMISRTPEVTCVVVDVSHEDPEVQFNWYVDGVEVHNAKTKPREEQFNSTFRVVSVLTVVHQDWLNGKEYKCKVSNKGLPAPIEKTISKTKGQPREPQVYTLPPSREEMTKNQVSLTCLVKGFYPSDIAVEWESNGQPENNYKTTPPMLDSDGSFFLYSKLTVDKSRWQQGNVFSCSVMHEALHNHYTQKSLSLSPGK

SEQ ID NO: 933 - protein, 8 aa, synthetic construct
  REGION 1..8: note = source = /note="Description of Artificial Sequence: Synthetic peptide"
GGGSGGGS

SEQ ID NO: 934 - protein, 10 aa, synthetic construct
  REGION 1..10: note = source = /note="Description of Artificial Sequence: Synthetic peptide"
GGGGSGGGGS

SEQ ID NO: 935 - protein, 12 aa, synthetic construct
  REGION 1..12: note = source = /note="Description of Artificial Sequence: Synthetic peptide"
GGGSGGGSGGGS

SEQ ID NO: 936 - protein, 15 aa, synthetic construct
  REGION 1..15: note = source = /note="Description of Artificial Sequence: Synthetic peptide"
GGGGSGGGGSGGGGS

SEQ ID NO: 937 - protein, 16 aa, synthetic construct
  REGION 1..16: note = source = /note="Description of Artificial Sequence: Synthetic peptide"
GGGSGGGSGGGSGGGS

SEQ ID NO: 938 - protein, 20 aa, synthetic construct
  REGION 1..20: note = source = /note="Description of Artificial Sequence: Synthetic peptide"
GGGGSGGGGSGGGGSGGGGS

SEQ ID NO: 939 - protein, 20 aa, synthetic construct
  REGION 1..20: note = source = /note="Description of Artificial Sequence: Synthetic peptide"
GGGSGGGSGGGSGGGSGGGS

SEQ ID NO: 940 - protein, 25 aa, synthetic construct
  REGION 1..25: note = source = /note="Description of Artificial Sequence: Synthetic peptide"
GGGGSGGGGSGGGGSGGGGSGGGGS

SEQ ID NO: 941 - protein, 24 aa, synthetic construct
  REGION 1..24: note = source = /note="Description of Artificial Sequence: Synthetic peptide"
GGGSGGGSGGGSGGGSGGGSGGGS

SEQ ID NO: 942 - protein, 30 aa, synthetic construct
  REGION 1..30: note = source = /note="Description of Artificial Sequence: Synthetic polypeptide"
GGGGSGGGGSGGGGSGGGGSGGGGSGGGGS

SEQ ID NO: 943 - protein, 22 aa, synthetic construct
  REGION 1..22: note = source = /note="Description of Artificial Sequence: Synthetic peptide"
MDMRVPAQLLGLLLLWLRGARC

SEQ ID NO: 944 - protein, 19 aa, synthetic construct
  REGION 1..19: note = source = /note="Description of Artificial Sequence: Synthetic peptide"
MAWALLLLTLLTQGTGSWA

SEQ ID NO: 945 - protein, 19 aa, synthetic construct
  REGION 1..19: note = source = /note="Description of Artificial Sequence: Synthetic peptide"
MTCSPLLLTLLIHCTGSWA

SEQ ID NO: 946 - protein, 20 aa, synthetic construct
  REGION 1..20: note = source = /note="Description of Artificial Sequence: Synthetic peptide"
MEAPAQLLFLLLLWLPDTTG

SEQ ID NO: 947 - protein, 19 aa, synthetic construct
  REGION 1..19: note = source = /note="Description of Artificial Sequence: Synthetic peptide"
MEWTWRVLFLVAAATGAHS

SEQ ID NO: 948 - protein, 20 aa, synthetic construct
  REGION 1..20: note = source = /note="Description of Artificial Sequence: Synthetic peptide"
METPAQLLFLLLLWLPDTTG

SEQ ID NO: 949 - protein, 20 aa, synthetic construct
  REGION 1..20: note = source = /note="Description of Artificial Sequence: Synthetic peptide"
METPAQLLFLLLLWLPDTTG

SEQ ID NO: 950 - protein, 19 aa, synthetic construct
  REGION 1..19: note = source = /note="Description of Artificial Sequence: Synthetic peptide"
MKHLWFFLLLVAAPRWVLS

SEQ ID NO: 951 - protein, 19 aa, synthetic construct
  REGION 1..19: note = source = /note="Description of Artificial Sequence: Synthetic peptide"
MEWSWVFLFFLSVTTGVHS

SEQ ID NO: 952 - protein, 106 aa, Homo sapiens
GQPKANPTVTLFPPSSEELQANKATLVCLISDFYPGAVTVAWKADGSPVKAGVETTKPSKQSNNKYAASSYLSLTPEQWKSHRSYSCQVTHEGSTVEKTVAPTECS

SEQ ID NO: 953 - protein, 30 aa, synthetic construct; identical to SEQ ID NO: 942
  REGION 1..30: note = MISC_FEATURE - /note="This sequence may encompass 2-6 "Gly-X-Ser" repeating units, wherein X is 3 or 4 and some positions may be absent"
  VARIANT 4: note = /replace=" "
  VARIANT 9: note = /replace=" "
  VARIANT 14: note = /replace=" "
  VARIANT 19: note = /replace=" "
  VARIANT 24: note = /replace=" "
  VARIANT 29: note = /replace=" "
  REGION 1..30: note = MISC_FEATURE - /note="Variant residues given in the sequence have no preference with respect to those in the annotations for variant positions"
  REGION 1..30: note = source = /note="Description of Artificial Sequence: Synthetic polypeptide"
